United States Patent Application Publication US 2026/0337269 A1, published October 29, 2026 (application 19/343,269).

The application's sequence listing, which the Patent Office published only in electronic form, follows.

SEQUENCE LISTING (754 sequences)

SEQ ID NO: 1 - protein, 207 aa, Homo sapiens
MQSGTHWRVLGLCLLSVGVWGQDGNEEMGGITQTPYKVSISGTTVILTCPQYPGSEILWQHNDKNIGGDEDDKNIGSDEDHLSLKEFSELEQSGYYVCYPRGSKPEDANFYLYLRARVCENCMEMDVMSVATIVIVDICITGGLLLLVYYWSKNRKAKAKPVTRGAGAGGRQRGQNKERPPPVPNPDYEPIRKGQRDLYSGLNQRRI

SEQ ID NO: 2 - protein, 104 aa, Homo sapiens
DGNEEMGGITQTPYKVSISGTTVILTCPQYPGSEILWQHNDKNIGGDEDDKNIGSDEDHLSLKEFSELEQSGYYVCYPRGSKPEDANFYLYLRARVCENCMEMD

SEQ ID NO: 3 - protein, 432 aa, synthetic construct
  REGION 1..432: note = Description of Artificial Sequence: Synthetic polypeptide
FKIPIEELEDRVFVNCNTSITWVEGTVGTLLSDITRLDLGKRILDPRGIYRCNGTDIYKDKESTVQVHYRMGSADDAKKDAAKKDDAKKDDAKKDGSDGNEEMGGITQTPYKVSISGTTVILTCPQYPGSEILWQHNDKNIGGDEDDKNIGSDEDHLSLKEFSELEQSGYYVCYPRGSKPEDANFYLYLRARVSPPSPAPELLGGPSVFLFPPKPKDTLMISRTPEVTCVVVDVSHEDPEVKFNWYVDGVEVHNAKTKPREEQYNSTYRVVSVLTVLHQDWLNGKEYKCKVSNKALPAPIEKTISKAKGQPREPQVYTLPPSRDELTKNQVSLTCLVKGFYPSDIAVEWESNGQPENNYKTTPPVLDSDGSFFLYSKLTVDKSRWQQGNVFSCSVMHEALHNHYTQKSLSLSPGKGGGLNDIFEAQKIEWHE

SEQ ID NO: 4 - protein, 426 aa, synthetic construct
  REGION 1..426: note = Description of Artificial Sequence: Synthetic polypeptide
QDGNEEMGGITQTPYKVSISGTTVILTCPQYPGSEILWQHNDKNIGGDEDDKNIGSDEDHLSLKEFSELEQSGYYVCYPRGSKPEDANFYLYLRARVGSADDAKKDAAKKDDAKKDDAKKDGSQSIKGNHLVKVYDYQEDGSVLLTCDAEAKNITWFKDGKMIGFLTEDKKKWNLGSNAKDPRGMYQCKGSQNKSKPLQVYYRMGSGSLGGPSVFLFPPKPKDTLMISRTPEVTCVVVDVSQEDPEVQFNWYVDGVEVHNAKTKPREEQFNSTYRVVSVLTVLHQDWLNGKEYKCKVSNKGLPSSIEKTISKAKGQPREPQVYTFPPSQEEMTKNQVSLRCLVKGFYPSDIAVEWESNGQPENNYKTTKPVLDSDGSFRLESRLTVDKSRWQEGNVFSCSVMHEALHNHYTQKSLSLSGGHHHHHH

SEQ ID NO: 5 - protein, 805 aa, synthetic construct
  REGION 1..805: note = Description of Artificial Sequence: Synthetic polypeptide
QDGNEEMGGITQTPYKVSISGTTVILTCPQYPGSEILWQHNDKNIGGDEDDKNIGSDEDHLSLKEFSELEQSGYYVCYPRGSKPEDANFYLYLRARVGSADDAKKDAAKKDDAKKDDAKKDGSQSIKGNHLVKVYDYQEDGSVLLTCDAEAKNITWFKDGKMIGFLTEDKKKWNLGSNAKDPRGMYQCKGSQNKSKPLQVYYRMGGGSDAHKSEVAHRFKDLGEENFKALVLIAFAQYLQQSPFEDHVKLVNEVTEFAKTCVADESAENCDKSLHTLFGDKLCTVATLRETYGEMADCCAKQEPERNECFLQHKDDNPNLPRLVRPEVDVMCTAFHDNEETFLKKYLYEIARRHPYFYAPELLFFAKRYKAAFTECCQAADKAACLLPKLDELRDEGKASSAKQRLKCASLQKFGERAFKAWAVARLSQRFPKAEFAEVSKLVTDLTKVHTECCHGDLLECADDRADLAKYICENQDSISSKLKECCEKPLLEKSHCIAEVENDEMPADLPSLAADFVESKDVCKNYAEAKDVFLGMFLYEYARRHPDYSVVLLLRLAKTYETTLEKCCAAADPHECYAKVFDEFKPLVEEPQNLIKQNCELFEQLGEYKFQNALLVRYTKKVPQVSTPTLVEVSRNLGKVGSKCCKHPEAKRMPCAEDYLSVVLNQLCVLHEKTPVSDRVTKCCTESLVNRRPCFSALEVDETYVPKEFNAETFTFHADICTLSEKERQIKKQTALVELVKHKPKATKEQLKAVMDDFAAFVEKCCKADDKETCFAEEGKKLVAASQAALGLGGGSHHHHHHHH

SEQ ID NO: 6 - protein, 5 aa, synthetic construct
  REGION 1..5: note = Description of Artificial Sequence: Synthetic peptide
RYNMN

SEQ ID NO: 7 - protein, 17 aa, synthetic construct
  REGION 1..17: note = Description of Artificial Sequence: Synthetic peptide
SISTSSNYIYYADSVKG

SEQ ID NO: 8 - protein, 7 aa, synthetic construct
  REGION 1..7: note = Description of Artificial Sequence: Synthetic peptide
GWGPFDY

SEQ ID NO: 9 - protein, 11 aa, synthetic construct
  REGION 1..11: note = Description of Artificial Sequence: Synthetic peptide
RARQSIGTAIH

SEQ ID NO: 10 - protein, 7 aa, synthetic construct
  REGION 1..7: note = Description of Artificial Sequence: Synthetic peptide
YASESIS

SEQ ID NO: 11 - protein, 9 aa, synthetic construct
  REGION 1..9: note = Description of Artificial Sequence: Synthetic peptide
QQSGSWPYT

SEQ ID NO: 12 - protein, 7 aa, synthetic construct
  REGION 1..7: note = Description of Artificial Sequence: Synthetic peptide
GFTFSRY

SEQ ID NO: 13 - protein, 6 aa, synthetic construct
  REGION 1..6: note = Description of Artificial Sequence: Synthetic peptide
STSSNY

SEQ ID NO: 14 - protein, 6 aa, synthetic construct
  REGION 1..6: note = Description of Artificial Sequence: Synthetic peptide
GWGPFD

SEQ ID NO: 15 - protein, 7 aa, synthetic construct
  REGION 1..7: note = Description of Artificial Sequence: Synthetic peptide
RQSIGTA

SEQ ID NO: 16 - skipped

SEQ ID NO: 17 - protein, 6 aa, synthetic construct
  REGION 1..6: note = Description of Artificial Sequence: Synthetic peptide
SGSWPY

SEQ ID NO: 18 - protein, 8 aa, synthetic construct
  REGION 1..8: note = Description of Artificial Sequence: Synthetic peptide
GFTFSRYN

SEQ ID NO: 19 - protein, 8 aa, synthetic construct
  REGION 1..8: note = Description of Artificial Sequence: Synthetic peptide
ISTSSNYI

SEQ ID NO: 20 - protein, 9 aa, synthetic construct
  REGION 1..9: note = Description of Artificial Sequence: Synthetic peptide
TRGWGPFDY

SEQ ID NO: 21 - protein, 6 aa, synthetic construct
  REGION 1..6: note = Description of Artificial Sequence: Synthetic peptide
QSIGTA

SEQ ID NO: 22 - protein, 9 aa, synthetic construct
  REGION 1..9: note = Description of Artificial Sequence: Synthetic peptide
QQSGSWPYT

SEQ ID NO: 23 - protein, 116 aa, synthetic construct
  REGION 1..116: note = Description of Artificial Sequence: Synthetic polypeptide
EVQLVESGGGLVKPGGSLRLSCAASGFTFSRYNMNWVRQAPGKGLEWVSSISTSSNYIYYADSVKGRFTFSRDNAKNSLDLQMSGLRAEDTAIYYCTRGWGPFDYWGQGTLVTVSS

SEQ ID NO: 24 - protein, 107 aa, synthetic construct
  REGION 1..107: note = Description of Artificial Sequence: Synthetic polypeptide
DIQMTQSPSSLSASVGDRVTITCRARQSIGTAIHWYQQKPGKAPKLLIKYASESISGVPSRFSGSGSGTDFTLTISSVQPEDFATYYCQQSGSWPYTFGQGTKLEIK

SEQ ID NO: 25 - protein, 446 aa, synthetic construct
  REGION 1..446: note = Description of Artificial Sequence: Synthetic polypeptide
EVQLVESGGGLVKPGGSLRLSCAASGFTFSRYNMNWVRQAPGKGLEWVSSISTSSNYIYYADSVKGRFTFSRDNAKNSLDLQMSGLRAEDTAIYYCTRGWGPFDYWGQGTLVTVSSASTKGPSVFPLAPSSKSTSGGTAALGCLVKDYFPEPVTVSWNSGALTSGVHTFPAVLQSSGLYSLSSVVTVPSSSLGTQTYICNVNHKPSNTKVDKKVEPKSCDKTHTCPPCPAPELLGGPSVFLFPPKPKDTLMISRTPEVTCVVVDVSHEDPEVKFNWYVDGVEVHNAKTKPREEQYNSTYRVVSVLTVLHQDWLNGKEYKCKVSNKALPAPIEKTISKAKGQPREPQVYTLPPSREEMTKNQVSLTCLVKGFYPSDIAVEWESNGQPENNYKTTPPVLDSDGSFFLYSKLTVDKSRWQQGNVFSCSVMHEALHNHYTQKSLSLSPGK

SEQ ID NO: 26 - protein, 214 aa, synthetic construct
  REGION 1..214: note = Description of Artificial Sequence: Synthetic polypeptide
DILLTQSPGILSVSPGERVSFSCRARQSIGTAIHWYQQRTNGSPRLLIKYASESISGIPSRFSGSGSGTDFTLTINSVESEDIADYYCQQSNSWPYTFGGGTKLEIKRTVAAPSVFIFPPSDEQLKSGTASVVCLLNNFYPREAKVQWKVDNALQSGNSQESVTEQDSKDSTYSLSSTLTLSKADYEKHKVYACEVTHQGLSSPVTKSFNRGEC

SEQ ID NO: 27 - protein, 107 aa, synthetic construct
  REGION 1..107: note = Description of Artificial Sequence: Synthetic polypeptide
DIQMTQSPSSLSASVGDRVTITCRARQSIGTAIHWYQQKPGKAPKLLIYYASESISGVPSRFSGSGSGTDFTLTISSVQPEDFATYYCQQSGSWPYTFGQGTKLEIK

SEQ ID NO: 28 - protein, 107 aa, synthetic construct
  REGION 1..107: note = Description of Artificial Sequence: Synthetic polypeptide
DIQMTQSPSSLSASVGDRVTITCRARQSIGTAIHWYQQKPGKAPKLLIKYASESISGVPSRFSGSGSGTDFTLTISSLQPEDFATYYCQQSGSWPYTFGQGTKLEIK

SEQ ID NO: 29 - protein, 107 aa, synthetic construct
  REGION 1..107: note = Description of Artificial Sequence: Synthetic polypeptide
DIQMTQSPSSLSASVGDRVTITCRARQSIGTAIHWYQQKPGKAPKLLIYYASESISGVPSRFSGSGSGTDFTLTISSLQPEDFATYYCQQSGSWPYTFGQGTKLEIK

SEQ ID NO: 30 - protein, 107 aa, synthetic construct
  REGION 1..107: note = Description of Artificial Sequence: Synthetic polypeptide
DILLTQSPGILSVSPGERVSFSCRARQSIGTAIHWYQQRTNGSPRLLIKYASESISGIPSRFSGSGSGTDFTLTINSVESEDIADYYCQQSGSWPYTFGGGTKLEIK

SEQ ID NO: 31 - protein, 20 aa, synthetic construct
  REGION 1..20: note = Description of Artificial Sequence: Synthetic peptide
GGSEGKSSGSGSESKSTGGS

SEQ ID NO: 32 - protein, 8 aa, synthetic construct
  REGION 1..8: note = Description of Artificial Sequence: Synthetic peptide
GGGSGGGS

SEQ ID NO: 33 - protein, 12 aa, synthetic construct
  REGION 1..12: note = Description of Artificial Sequence: Synthetic peptide
GGGSGGGSGGGS

SEQ ID NO: 34 - protein, 16 aa, synthetic construct
  REGION 1..16: note = Description of Artificial Sequence: Synthetic peptide
GGGSGGGSGGGSGGGS

SEQ ID NO: 35 - protein, 20 aa, synthetic construct
  REGION 1..20: note = Description of Artificial Sequence: Synthetic peptide
GGGSGGGSGGGSGGGSGGGS

SEQ ID NO: 36 - protein, 15 aa, synthetic construct
  REGION 1..15: note = Description of Artificial Sequence: Synthetic peptide
GGGGSGGGGSGGGGS

SEQ ID NO: 37 - protein, 20 aa, synthetic construct
  REGION 1..20: note = Description of Artificial Sequence: Synthetic peptide
GGGGSGGGGSGGGGSGGGGS

SEQ ID NO: 38 - protein, 25 aa, synthetic construct
  REGION 1..25: note = Description of Artificial Sequence: Synthetic peptide
GGGGSGGGGSGGGGSGGGGSGGGGS

SEQ ID NO: 39 - protein, 18 aa, synthetic construct
  REGION 1..18: note = Description of Artificial Sequence: Synthetic peptide
GSTSGSGKPGSGEGSTKG

SEQ ID NO: 40 - protein, 14 aa, synthetic construct
  REGION 1..14: note = Description of Artificial Sequence: Synthetic peptide
IRPRAIGGSKPRVA

SEQ ID NO: 41 - protein, 15 aa, synthetic construct
  REGION 1..15: note = Description of Artificial Sequence: Synthetic peptide
GKGGSGKGGSGKGGS

SEQ ID NO: 42 - protein, 15 aa, synthetic construct
  REGION 1..15: note = Description of Artificial Sequence: Synthetic peptide
GGKGSGGKGSGGKGS

SEQ ID NO: 43 - protein, 15 aa, synthetic construct
  REGION 1..15: note = Description of Artificial Sequence: Synthetic peptide
GGGKSGGGKSGGGKS

SEQ ID NO: 44 - protein, 15 aa, synthetic construct
  REGION 1..15: note = Description of Artificial Sequence: Synthetic peptide
GKGKSGKGKSGKGKS

SEQ ID NO: 45 - protein, 15 aa, synthetic construct
  REGION 1..15: note = Description of Artificial Sequence: Synthetic peptide
GGGKSGGKGSGKGGS

SEQ ID NO: 46 - protein, 15 aa, synthetic construct
  REGION 1..15: note = Description of Artificial Sequence: Synthetic peptide
GKPGSGKPGSGKPGS

SEQ ID NO: 47 - protein, 20 aa, synthetic construct
  REGION 1..20: note = Description of Artificial Sequence: Synthetic peptide
GKPGSGKPGSGKPGSGKPGS

SEQ ID NO: 48 - protein, 20 aa, synthetic construct
  REGION 1..20: note = Description of Artificial Sequence: Synthetic peptide
GKGKSGKGKSGKGKSGKGKS

SEQ ID NO: 49 - protein, 14 aa, synthetic construct
  REGION 1..14: note = Description of Artificial Sequence: Synthetic peptide
STAGDTHLGGEDFD

SEQ ID NO: 50 - protein, 15 aa, synthetic construct
  REGION 1..15: note = Description of Artificial Sequence: Synthetic peptide
GEGGSGEGGSGEGGS

SEQ ID NO: 51 - protein, 15 aa, synthetic construct
  REGION 1..15: note = Description of Artificial Sequence: Synthetic peptide
GGEGSGGEGSGGEGS

SEQ ID NO: 52 - protein, 15 aa, synthetic construct
  REGION 1..15: note = Description of Artificial Sequence: Synthetic peptide
GEGESGEGESGEGES

SEQ ID NO: 53 - protein, 15 aa, synthetic construct
  REGION 1..15: note = Description of Artificial Sequence: Synthetic peptide
GGGESGGEGSGEGGS

SEQ ID NO: 54 - protein, 20 aa, synthetic construct
  REGION 1..20: note = Description of Artificial Sequence: Synthetic peptide
GEGESGEGESGEGESGEGES

SEQ ID NO: 55 - protein, 18 aa, synthetic construct
  REGION 1..18: note = Description of Artificial Sequence: Synthetic peptide
GSTSGSGKPGSGEGSTKG

SEQ ID NO: 56 - protein, 19 aa, synthetic construct
  REGION 1..19: note = Description of Artificial Sequence: Synthetic peptide
PRGASKSGSASQTGSAPGS

SEQ ID NO: 57 - protein, 19 aa, synthetic construct
  REGION 1..19: note = Description of Artificial Sequence: Synthetic peptide
GTAAAGAGAAGGAAAGAAG

SEQ ID NO: 58 - protein, 19 aa, synthetic construct
  REGION 1..19: note = Description of Artificial Sequence: Synthetic peptide
GTSGSSGSGSGGSGSGGGG

SEQ ID NO: 59 - protein, 20 aa, synthetic construct
  REGION 1..20: note = Description of Artificial Sequence: Synthetic peptide
GKPGSGKPGSGKPGSGKPGS

SEQ ID NO: 60 - protein, 4 aa, synthetic construct
  REGION 1..4: note = Description of Artificial Sequence: Synthetic peptide
GSGS

SEQ ID NO: 61 - protein, 10 aa, synthetic construct
  REGION 1..10: note = Description of Artificial Sequence: Synthetic peptide
APAPAPAPAP

SEQ ID NO: 62 - protein, 20 aa, synthetic construct
  REGION 1..20: note = Description of Artificial Sequence: Synthetic peptide
APAPAPAPAPAPAPAPAPAP

SEQ ID NO: 63 - protein, 32 aa, synthetic construct
  REGION 1..32: note = Description of Artificial Sequence: Synthetic polypeptide
AEAAAKEAAAKEAAAAKEAAAAKEAAAAKAAA

SEQ ID NO: 64 - protein, 16 aa, synthetic construct
  REGION 1..16: note = Description of Artificial Sequence: Synthetic peptide
GTEGKSSGSGSESKST

SEQ ID NO: 65 - protein, 243 aa, synthetic construct
  REGION 1..243: note = Description of Artificial Sequence: Synthetic polypeptide
EVQLVESGGGLVKPGGSLRLSCAASGFTFSRYNMNWVRQAPGKGLEWVSSISTSSNYIYYADSVKGRFTFSRDNAKNSLDLQMSGLRAEDTAIYYCTRGWGPFDYWGQGTLVTVSSGGSEGKSSGSGSESKSTGGSDIQMTQSPSSLSASVGDRVTITCRARQSIGTAIHWYQQKPGKAPKLLIYYASESISGVPSRFSGSGSGTDFTLTISSVQPEDFATYYCQQSGSWPYTFGQGTKLEIK

SEQ ID NO: 66 - protein, 243 aa, synthetic construct
  REGION 1..243: note = Description of Artificial Sequence: Synthetic polypeptide
DIQMTQSPSSLSASVGDRVTITCRARQSIGTAIHWYQQKPGKAPKLLIYYASESISGVPSRFSGSGSGTDFTLTISSVQPEDFATYYCQQSGSWPYTFGQGTKLEIKGGSEGKSSGSGSESKSTGGSEVQLVESGGGLVKPGGSLRLSCAASGFTFSRYNMNWVRQAPGKGLEWVSSISTSSNYIYYADSVKGRFTFSRDNAKNSLDLQMSGLRAEDTAIYYCTRGWGPFDYWGQGTLVTVSS

SEQ ID NO: 67 - protein, 243 aa, synthetic construct
  REGION 1..243: note = Description of Artificial Sequence: Synthetic polypeptide
EVQLVESGGGLVKPGGSLRLSCAASGFTFSRYNMNWVRQAPGKGLEWVSSISTSSNYIYYADSVKGRFTFSRDNAKNSLDLQMSGLRAEDTAIYYCTRGWGPFDYWGQGTLVTVSSGGSEGKSSGSGSESKSTGGSDIQMTQSPSSLSASVGDRVTITCRARQSIGTAIHWYQQKPGKAPKLLIKYASESISGVPSRFSGSGSGTDFTLTISSLQPEDFATYYCQQSGSWPYTFGQGTKLEIK

SEQ ID NO: 68 - protein, 243 aa, synthetic construct
  REGION 1..243: note = Description of Artificial Sequence: Synthetic polypeptide
DIQMTQSPSSLSASVGDRVTITCRARQSIGTAIHWYQQKPGKAPKLLIKYASESISGVPSRFSGSGSGTDFTLTISSLQPEDFATYYCQQSGSWPYTFGQGTKLEIKGGSEGKSSGSGSESKSTGGSEVQLVESGGGLVKPGGSLRLSCAASGFTFSRYNMNWVRQAPGKGLEWVSSISTSSNYIYYADSVKGRFTFSRDNAKNSLDLQMSGLRAEDTAIYYCTRGWGPFDYWGQGTLVTVSS

SEQ ID NO: 69 - protein, 243 aa, synthetic construct
  REGION 1..243: note = Description of Artificial Sequence: Synthetic polypeptide
EVQLVESGGGLVKPGGSLRLSCAASGFTFSRYNMNWVRQAPGKGLEWVSSISTSSNYIYYADSVKGRFTFSRDNAKNSLDLQMSGLRAEDTAIYYCTRGWGPFDYWGQGTLVTVSSGGSEGKSSGSGSESKSTGGSDIQMTQSPSSLSASVGDRVTITCRARQSIGTAIHWYQQKPGKAPKLLIKYASESISGVPSRFSGSGSGTDFTLTISSVQPEDFATYYCQQSGSWPYTFGQGTKLEIK

SEQ ID NO: 70 - protein, 243 aa, synthetic construct
  REGION 1..243: note = Description of Artificial Sequence: Synthetic polypeptide
DIQMTQSPSSLSASVGDRVTITCRARQSIGTAIHWYQQKPGKAPKLLIKYASESISGVPSRFSGSGSGTDFTLTISSVQPEDFATYYCQQSGSWPYTFGQGTKLEIKGGSEGKSSGSGSESKSTGGSEVQLVESGGGLVKPGGSLRLSCAASGFTFSRYNMNWVRQAPGKGLEWVSSISTSSNYIYYADSVKGRFTFSRDNAKNSLDLQMSGLRAEDTAIYYCTRGWGPFDYWGQGTLVTVSS

SEQ ID NO: 71 - protein, 243 aa, synthetic construct
  REGION 1..243: note = Description of Artificial Sequence: Synthetic polypeptide
EVQLVESGGGLVKPGGSLRLSCAASGFTFSRYNMNWVRQAPGKGLEWVSSISTSSNYIYYADSVKGRFTFSRDNAKNSLDLQMSGLRAEDTAIYYCTRGWGPFDYWGQGTLVTVSSGGSEGKSSGSGSESKSTGGSDIQMTQSPSSLSASVGDRVTITCRARQSIGTAIHWYQQKPGKAPKLLIYYASESISGVPSRFSGSGSGTDFTLTISSLQPEDFATYYCQQSGSWPYTFGQGTKLEIK

SEQ ID NO: 72 - protein, 243 aa, synthetic construct
  REGION 1..243: note = Description of Artificial Sequence: Synthetic polypeptide
DIQMTQSPSSLSASVGDRVTITCRARQSIGTAIHWYQQKPGKAPKLLIYYASESISGVPSRFSGSGSGTDFTLTISSLQPEDFATYYCQQSGSWPYTFGQGTKLEIKGGSEGKSSGSGSESKSTGGSEVQLVESGGGLVKPGGSLRLSCAASGFTFSRYNMNWVRQAPGKGLEWVSSISTSSNYIYYADSVKGRFTFSRDNAKNSLDLQMSGLRAEDTAIYYCTRGWGPFDYWGQGTLVTVSS

SEQ ID NO: 73 - protein, 243 aa, synthetic construct
  REGION 1..243: note = Description of Artificial Sequence: Synthetic polypeptide
EVQLVESGGGLVKPGGSLRLSCAASGFTFSRYNMNWVRQAPGKGLEWVSSISTSSNYIYYADSVKGRFTFSRDNAKNSLDLQMSGLRAEDTAIYYCTRGWGPFDYWGQGTLVTVSSGGSEGKSSGSGSESKSTGGSDILLTQSPGILSVSPGERVSFSCRARQSIGTAIHWYQQRTNGSPRLLIKYASESISGIPSRFSGSGSGTDFTLTINSVESEDIADYYCQQSGSWPYTFGGGTKLEIK

SEQ ID NO: 74 - protein, 243 aa, synthetic construct
  REGION 1..243: note = Description of Artificial Sequence: Synthetic polypeptide
DILLTQSPGILSVSPGERVSFSCRARQSIGTAIHWYQQRTNGSPRLLIKYASESISGIPSRFSGSGSGTDFTLTINSVESEDIADYYCQQSGSWPYTFGGGTKLEIKGGSEGKSSGSGSESKSTGGSEVQLVESGGGLVKPGGSLRLSCAASGFTFSRYNMNWVRQAPGKGLEWVSSISTSSNYIYYADSVKGRFTFSRDNAKNSLDLQMSGLRAEDTAIYYCTRGWGPFDYWGQGTLVTVSS

SEQ ID NO: 75 - protein, 475 aa, synthetic construct
  REGION 1..475: note = Description of Artificial Sequence: Synthetic polypeptide
EVQLVESGGGLVKPGGSLRLSCAASGFTFSRYNMNWVRQAPGKGLEWVSSISTSSNYIYYADSVKGRFTFSRDNAKNSLDLQMSGLRAEDTAIYYCTRGWGPFDYWGQGTLVTVSSGGSEGKSSGSGSESKSTGGSDIQMTQSPSSLSASVGDRVTITCRARQSIGTAIHWYQQKPGKAPKLLIYYASESISGVPSRFSGSGSGTDFTLTISSVQPEDFATYYCQQSGSWPYTFGQGTKLEIKEPKSSDKTHTCPPCPAPEAAGGPSVFLFPPKPKDTLMISRTPEVTCVVVSVSHEDPEVKFNWYVDGVEVHNAKTKPREEQYNSTYRVVSVLTVLHQDWLNGKEYKCKVSNKALPAPIEKTISKAKGQPREPQVYVYPPSREEMTKNQVSLTCLVKGFYPSDIAVEWESNGQPENNYKTTPPVLDSDGSFALVSKLTVDKSRWQQGNVFSCSVMHEALHNHYTQKSLSLSPGK

SEQ ID NO: 76 - protein, 475 aa, synthetic construct
  REGION 1..475: note = Description of Artificial Sequence: Synthetic polypeptide
DIQMTQSPSSLSASVGDRVTITCRARQSIGTAIHWYQQKPGKAPKLLIYYASESISGVPSRFSGSGSGTDFTLTISSVQPEDFATYYCQQSGSWPYTFGQGTKLEIKGGSEGKSSGSGSESKSTGGSEVQLVESGGGLVKPGGSLRLSCAASGFTFSRYNMNWVRQAPGKGLEWVSSISTSSNYIYYADSVKGRFTFSRDNAKNSLDLQMSGLRAEDTAIYYCTRGWGPFDYWGQGTLVTVSSEPKSSDKTHTCPPCPAPEAAGGPSVFLFPPKPKDTLMISRTPEVTCVVVSVSHEDPEVKFNWYVDGVEVHNAKTKPREEQYNSTYRVVSVLTVLHQDWLNGKEYKCKVSNKALPAPIEKTISKAKGQPREPQVYVYPPSREEMTKNQVSLTCLVKGFYPSDIAVEWESNGQPENNYKTTPPVLDSDGSFALVSKLTVDKSRWQQGNVFSCSVMHEALHNHYTQKSLSLSPGK

SEQ ID NO: 77 - protein, 474 aa, synthetic construct
  REGION 1..474: note = Description of Artificial Sequence: Synthetic polypeptide
EVQLVESGGGLVKPGGSLRLSCAASGFTFSRYNMNWVRQAPGKGLEWVSSISTSSNYIYYADSVKGRFTFSRDNAKNSLDLQMSGLRAEDTAIYYCTRGWGPFDYWGQGTLVTVSSGGSEGKSSGSGSESKSTGGSDIQMTQSPSSLSASVGDRVTITCRARQSIGTAIHWYQQKPGKAPKLLIKYASESISGVPSRFSGSGSGTDFTLTISSLQPEDFATYYCQQSGSWPYTFGQGTKLEIKEPKSSDKTHTCPPCPAPEAAGGPSVFLFPPKPKDTLMISRTPEVTCVVVSVSHEDPEVKFNWYVDGVEVHNAKTKPREEQYNSTYRVVSVLTVLHQDWLNGKEYKCKVSNKALPAPIEKTISKAKGQPREPQVYVYPPSREEMTKNQVSLTCLVKGFYPSDIAVEWESNGQPENNYKTTPPVLDSDGSFALVSKLTVDKSRWQQGNVFSCSVMHEALHNHYTQKSLSLSPG

SEQ ID NO: 78 - protein, 474 aa, synthetic construct
  REGION 1..474: note = Description of Artificial Sequence: Synthetic polypeptide
DIQMTQSPSSLSASVGDRVTITCRARQSIGTAIHWYQQKPGKAPKLLIKYASESISGVPSRFSGSGSGTDFTLTISSLQPEDFATYYCQQSGSWPYTFGQGTKLEIKGGSEGKSSGSGSESKSTGGSEVQLVESGGGLVKPGGSLRLSCAASGFTFSRYNMNWVRQAPGKGLEWVSSISTSSNYIYYADSVKGRFTFSRDNAKNSLDLQMSGLRAEDTAIYYCTRGWGPFDYWGQGTLVTVSSEPKSSDKTHTCPPCPAPEAAGGPSVFLFPPKPKDTLMISRTPEVTCVVVSVSHEDPEVKFNWYVDGVEVHNAKTKPREEQYNSTYRVVSVLTVLHQDWLNGKEYKCKVSNKALPAPIEKTISKAKGQPREPQVYVYPPSREEMTKNQVSLTCLVKGFYPSDIAVEWESNGQPENNYKTTPPVLDSDGSFALVSKLTVDKSRWQQGNVFSCSVMHEALHNHYTQKSLSLSPG

SEQ ID NO: 79 - protein, 475 aa, synthetic construct
  REGION 1..475: note = Description of Artificial Sequence: Synthetic polypeptide
EVQLVESGGGLVKPGGSLRLSCAASGFTFSRYNMNWVRQAPGKGLEWVSSISTSSNYIYYADSVKGRFTFSRDNAKNSLDLQMSGLRAEDTAIYYCTRGWGPFDYWGQGTLVTVSSGGSEGKSSGSGSESKSTGGSDIQMTQSPSSLSASVGDRVTITCRARQSIGTAIHWYQQKPGKAPKLLIKYASESISGVPSRFSGSGSGTDFTLTISSVQPEDFATYYCQQSGSWPYTFGQGTKLEIKEPKSSDKTHTCPPCPAPEAAGGPSVFLFPPKPKDTLMISRTPEVTCVVVSVSHEDPEVKFNWYVDGVEVHNAKTKPREEQYNSTYRVVSVLTVLHQDWLNGKEYKCKVSNKALPAPIEKTISKAKGQPREPQVYVYPPSREEMTKNQVSLTCLVKGFYPSDIAVEWESNGQPENNYKTTPPVLDSDGSFALVSKLTVDKSRWQQGNVFSCSVMHEALHNHYTQKSLSLSPGK

SEQ ID NO: 80 - protein, 475 aa, synthetic construct
  REGION 1..475: note = Description of Artificial Sequence: Synthetic polypeptide
DIQMTQSPSSLSASVGDRVTITCRARQSIGTAIHWYQQKPGKAPKLLIKYASESISGVPSRFSGSGSGTDFTLTISSVQPEDFATYYCQQSGSWPYTFGQGTKLEIKGGSEGKSSGSGSESKSTGGSEVQLVESGGGLVKPGGSLRLSCAASGFTFSRYNMNWVRQAPGKGLEWVSSISTSSNYIYYADSVKGRFTFSRDNAKNSLDLQMSGLRAEDTAIYYCTRGWGPFDYWGQGTLVTVSSEPKSSDKTHTCPPCPAPEAAGGPSVFLFPPKPKDTLMISRTPEVTCVVVSVSHEDPEVKFNWYVDGVEVHNAKTKPREEQYNSTYRVVSVLTVLHQDWLNGKEYKCKVSNKALPAPIEKTISKAKGQPREPQVYVYPPSREEMTKNQVSLTCLVKGFYPSDIAVEWESNGQPENNYKTTPPVLDSDGSFALVSKLTVDKSRWQQGNVFSCSVMHEALHNHYTQKSLSLSPGK

SEQ ID NO: 81 - protein, 475 aa, synthetic construct
  REGION 1..475: note = Description of Artificial Sequence: Synthetic polypeptide
EVQLVESGGGLVKPGGSLRLSCAASGFTFSRYNMNWVRQAPGKGLEWVSSISTSSNYIYYADSVKGRFTFSRDNAKNSLDLQMSGLRAEDTAIYYCTRGWGPFDYWGQGTLVTVSSGGSEGKSSGSGSESKSTGGSDIQMTQSPSSLSASVGDRVTITCRARQSIGTAIHWYQQKPGKAPKLLIYYASESISGVPSRFSGSGSGTDFTLTISSLQPEDFATYYCQQSGSWPYTFGQGTKLEIKEPKSSDKTHTCPPCPAPEAAGGPSVFLFPPKPKDTLMISRTPEVTCVVVSVSHEDPEVKFNWYVDGVEVHNAKTKPREEQYNSTYRVVSVLTVLHQDWLNGKEYKCKVSNKALPAPIEKTISKAKGQPREPQVYVYPPSREEMTKNQVSLTCLVKGFYPSDIAVEWESNGQPENNYKTTPPVLDSDGSFALVSKLTVDKSRWQQGNVFSCSVMHEALHNHYTQKSLSLSPGK

SEQ ID NO: 82 - protein, 475 aa, synthetic construct
  REGION 1..475: note = Description of Artificial Sequence: Synthetic polypeptide
DIQMTQSPSSLSASVGDRVTITCRARQSIGTAIHWYQQKPGKAPKLLIYYASESISGVPSRFSGSGSGTDFTLTISSLQPEDFATYYCQQSGSWPYTFGQGTKLEIKGGSEGKSSGSGSESKSTGGSEVQLVESGGGLVKPGGSLRLSCAASGFTFSRYNMNWVRQAPGKGLEWVSSISTSSNYIYYADSVKGRFTFSRDNAKNSLDLQMSGLRAEDTAIYYCTRGWGPFDYWGQGTLVTVSSEPKSSDKTHTCPPCPAPEAAGGPSVFLFPPKPKDTLMISRTPEVTCVVVSVSHEDPEVKFNWYVDGVEVHNAKTKPREEQYNSTYRVVSVLTVLHQDWLNGKEYKCKVSNKALPAPIEKTISKAKGQPREPQVYVYPPSREEMTKNQVSLTCLVKGFYPSDIAVEWESNGQPENNYKTTPPVLDSDGSFALVSKLTVDKSRWQQGNVFSCSVMHEALHNHYTQKSLSLSPGK

SEQ ID NO: 83 - protein, 475 aa, synthetic construct
  REGION 1..475: note = Description of Artificial Sequence: Synthetic polypeptide
EVQLVESGGGLVKPGGSLRLSCAASGFTFSRYNMNWVRQAPGKGLEWVSSISTSSNYIYYADSVKGRFTFSRDNAKNSLDLQMSGLRAEDTAIYYCTRGWGPFDYWGQGTLVTVSSGGSEGKSSGSGSESKSTGGSDILLTQSPGILSVSPGERVSFSCRARQSIGTAIHWYQQRTNGSPRLLIKYASESISGIPSRFSGSGSGTDFTLTINSVESEDIADYYCQQSGSWPYTFGGGTKLEIKEPKSSDKTHTCPPCPAPEAAGGPSVFLFPPKPKDTLMISRTPEVTCVVVSVSHEDPEVKFNWYVDGVEVHNAKTKPREEQYNSTYRVVSVLTVLHQDWLNGKEYKCKVSNKALPAPIEKTISKAKGQPREPQVYVYPPSREEMTKNQVSLTCLVKGFYPSDIAVEWESNGQPENNYKTTPPVLDSDGSFALVSKLTVDKSRWQQGNVFSCSVMHEALHNHYTQKSLSLSPGK

SEQ ID NO: 84 - protein, 475 aa, synthetic construct
  REGION 1..475: note = Description of Artificial Sequence: Synthetic polypeptide
DILLTQSPGILSVSPGERVSFSCRARQSIGTAIHWYQQRTNGSPRLLIKYASESISGIPSRFSGSGSGTDFTLTINSVESEDIADYYCQQSGSWPYTFGGGTKLEIKGGSEGKSSGSGSESKSTGGSEVQLVESGGGLVKPGGSLRLSCAASGFTFSRYNMNWVRQAPGKGLEWVSSISTSSNYIYYADSVKGRFTFSRDNAKNSLDLQMSGLRAEDTAIYYCTRGWGPFDYWGQGTLVTVSSEPKSSDKTHTCPPCPAPEAAGGPSVFLFPPKPKDTLMISRTPEVTCVVVSVSHEDPEVKFNWYVDGVEVHNAKTKPREEQYNSTYRVVSVLTVLHQDWLNGKEYKCKVSNKALPAPIEKTISKAKGQPREPQVYVYPPSREEMTKNQVSLTCLVKGFYPSDIAVEWESNGQPENNYKTTPPVLDSDGSFALVSKLTVDKSRWQQGNVFSCSVMHEALHNHYTQKSLSLSPGK

SEQ ID NO: 85 - protein, 445 aa, synthetic construct
  REGION 1..445: note = Description of Artificial Sequence: Synthetic polypeptide
EVQLVESGGGLVKPGGSLRLSCAASGFTFSRYNMNWVRQAPGKGLEWVSSISTSSNYIYYADSVKGRFTFSRDNAKNSLDLQMSGLRAEDTAIYYCTRGWGPFDYWGQGTLVTVSSASTKGPSVFPLAPSSKSTSGGTAALGCLVKDYFPEPVTVSWNSGALTSGVHTFPAVLQSSGLYSLSSVVTVPSSSLGTQTYICNVNHKPSNTKVDKKVEPKSCDKTHTCPPCPAPEAAGGPSVFLFPPKPKDTLMISRTPEVTCVVVSVSHEDPEVKFNWYVDGVEVHNAKTKPREEQYNSTYRVVSVLTVLHQDWLNGKEYKCKVSNKALPAPIEKTISKAKGQPREPQVYVYPPSREEMTKNQVSLTCLVKGFYPSDIAVEWESNGQPENNYKTTPPVLDSDGSFALVSKLTVDKSRWQQGNVFSCSVMHEALHNHYTQKSLSLSPG

SEQ ID NO: 86 - protein, 214 aa, synthetic construct
  REGION 1..214: note = Description of Artificial Sequence: Synthetic polypeptide
DIQMTQSPSSLSASVGDRVTITCRARQSIGTAIHWYQQKPGKAPKLLIYYASESISGVPSRFSGSGSGTDFTLTISSVQPEDFATYYCQQSGSWPYTFGQGTKLEIKRTVAAPSVFIFPPSDEQLKSGTASVVCLLNNFYPREAKVQWKVDNALQSGNSQESVTEQDSKDSTYSLSSTLTLSKADYEKHKVYACEVTHQGLSSPVTKSFNRGEC

SEQ ID NO: 87 - skipped

SEQ ID NO: 88 - protein, 214 aa, synthetic construct
  REGION 1..214: note = Description of Artificial Sequence: Synthetic polypeptide
DIQMTQSPSSLSASVGDRVTITCRARQSIGTAIHWYQQKPGKAPKLLIKYASESISGVPSRFSGSGSGTDFTLTISSLQPEDFATYYCQQSGSWPYTFGQGTKLEIKRTVAAPSVFIFPPSDEQLKSGTASVVCLLNNFYPREAKVQWKVDNALQSGNSQESVTEQDSKDSTYSLSSTLTLSKADYEKHKVYACEVTHQGLSSPVTKSFNRGEC

SEQ ID NO: 89 - skipped

SEQ ID NO: 90 - protein, 214 aa, synthetic construct
  REGION 1..214: note = Description of Artificial Sequence: Synthetic polypeptide
DIQMTQSPSSLSASVGDRVTITCRARQSIGTAIHWYQQKPGKAPKLLIKYASESISGVPSRFSGSGSGTDFTLTISSVQPEDFATYYCQQSGSWPYTFGQGTKLEIKRTVAAPSVFIFPPSDEQLKSGTASVVCLLNNFYPREAKVQWKVDNALQSGNSQESVTEQDSKDSTYSLSSTLTLSKADYEKHKVYACEVTHQGLSSPVTKSFNRGEC

SEQ ID NO: 91 - skipped

SEQ ID NO: 92 - protein, 214 aa, synthetic construct
  REGION 1..214: note = Description of Artificial Sequence: Synthetic polypeptide
DIQMTQSPSSLSASVGDRVTITCRARQSIGTAIHWYQQKPGKAPKLLIYYASESISGVPSRFSGSGSGTDFTLTISSLQPEDFATYYCQQSGSWPYTFGQGTKLEIKRTVAAPSVFIFPPSDEQLKSGTASVVCLLNNFYPREAKVQWKVDNALQSGNSQESVTEQDSKDSTYSLSSTLTLSKADYEKHKVYACEVTHQGLSSPVTKSFNRGEC

SEQ ID NO: 93 - skipped

SEQ ID NO: 94 - protein, 214 aa, synthetic construct
  REGION 1..214: note = Description of Artificial Sequence: Synthetic polypeptide
DILLTQSPGILSVSPGERVSFSCRARQSIGTAIHWYQQRTNGSPRLLIKYASESISGIPSRFSGSGSGTDFTLTINSVESEDIADYYCQQSGSWPYTFGGGTKLEIKRTVAAPSVFIFPPSDEQLKSGTASVVCLLNNFYPREAKVQWKVDNALQSGNSQESVTEQDSKDSTYSLSSTLTLSKADYEKHKVYACEVTHQGLSSPVTKSFNRGEC

SEQ ID NO: 95 - protein, 330 aa, Homo sapiens [sequence omitted]

SEQ ID NO: 96 - protein, 326 aa, Homo sapiens
ASTKGPSVFPLAPCSRSTSESTAALGCLVKDYFPEPVTVSWNSGALTSGVHTFPAVLQSSGLYSLSSVVTVPSSNFGTQTYTCNVDHKPSNTKVDKTVERKCCVECPPCPAPPVAGPSVFLFPPKPKDTLMISRTPEVTCVVVDVSHEDPEVQFNWYVDGVEVHNAKTKPREEQFNSTFRVVSVLTVVHQDWLNGKEYKCKVSNKGLPAPIEKTISKTKGQPREPQVYTLPPSREEMTKNQVSLTCLVKGFYPSDISVEWESNGQPENNYKTTPPMLDSDGSFFLYSKLTVDKSRWQQGNVFSCSVMHEALHNHYTQKSLSLSPGK

SEQ ID NO: 97 - protein, 327 aa, Homo sapiens
ASTKGPSVFPLAPCSRSTSESTAALGCLVKDYFPEPVTVSWNSGALTSGVHTFPAVLQSSGLYSLSSVVTVPSSSLGTKTYTCNVDHKPSNTKVDKRVESKYGPPCPSCPAPEFLGGPSVFLFPPKPKDTLMISRTPEVTCVVVDVSQEDPEVQFNWYVDGVEVHNAKTKPREEQFNSTYRVVSVLTVLHQDWLNGKEYKCKVSNKGLPSSIEKTISKAKGQPREPQVYTLPPSQEEMTKNQVSLTCLVKGFYPSDIAVEWESNGQPENNYKTTPPVLDSDGSFFLYSRLTVDKSRWQEGNVFSCSVMHEALHNHYTQKSLSLSLGK

SEQ ID NO: 98 - protein, 261 aa, Homo sapiens
MWDLVLSIALSVGCTGAVPLIQSRIVGGWECEKHSQPWQVAVYSHGWAHCGGVLVHPQWVLTAAHCLKKNSQVWLGRHNLFEPEDTGQRVPVSHSFPHPLYNMSLLKHQSLRPDEDSSHDLMLLRLSEPAKITDVVKVLGLPTQEPALGTTCYASGWGSIEPEEFLRPRSLQCVSLHLLSNDMCARAYSEKVTEFMLCAGLWTGGKDTCGGDSGGPLVCNGVLQGITSWGPEPCALPEKPAVYTKVVHYRKWIKDTIAANP

SEQ ID NO: 99 - protein, 91 aa, synthetic construct
  REGION 1..91: note = Description of Artificial Sequence: Synthetic polypeptide
QDGNEEMGGITQTPYKVSISGTTVILTCPQYPGSEILWQHNDKNIGGDEDDKNIGSDEDHLSLKEFSELEQSGYYVCYPRGSKPEDANFYL

SEQ ID NO: 100 - protein, 9 aa, synthetic construct
  REGION 1..9: note = Description of Artificial Sequence: Synthetic peptide
PQYPGSEIL

SEQ ID NO: 101 - protein, 9 aa, synthetic construct
  REGION 1..9: note = Description of Artificial Sequence: Synthetic peptide
GSDEDHLSL

SEQ ID NO: 102 - protein, 6 aa, synthetic construct
  REGION 1..6: note = Description of Artificial Sequence: Synthetic peptide
PRGSKP

SEQ ID NO: 103 - protein, 107 aa, synthetic construct
  REGION 1..107: note = Description of Artificial Sequence: Synthetic polypeptide
  VARIANT 4: note = L or M
  VARIANT 9: note = G or S
  VARIANT 10: note = I or S
  VARIANT 13: note = V or A
  VARIANT 15: note = P or V
  VARIANT 17: note = E or D
  VARIANT 20: note = S or T
  VARIANT 21: note = F or I
  VARIANT 22: note = S or T
  VARIANT 40: note = T or P
  VARIANT 41: note = N or G
  VARIANT 42: note = G or K
  VARIANT 43: note = S or A
  VARIANT 45: note = R or K
  VARIANT 49: note = K or Y
  VARIANT 58: note = I or V
  VARIANT 76: note = N or S
  VARIANT 78: note = V or L
  VARIANT 80: note = S or P
  VARIANT 83: note = I or F
  VARIANT 85: note = D or T
  VARIANT 92: note = N or G
  VARIANT 100: note = G or Q
DIQXTQSPXXLSXSXGXRVXXXCRARQSIGTAIHWYQQKXXXXPXLLIXYASESISGXPSRFSGSGSGTDFTLTIXSXQXEDXAXYYCQQSXSWPYTFGXGTKLEIK

SEQ ID NO: 104 - protein, 262 aa, synthetic construct
  REGION 1..262: note = Description of Artificial Sequence: Synthetic polypeptide
EVQLVESGGGLVKPGGSLRLSCAASGFTFSRYNMNWVRQAPGKGLEWVSSISTSSNYIYYADSVKGRFTFSRDNAKNSLDLQMSGLRAEDTAIYYCTRGWGPFDYWGQGTLVTVSSGTEGKSSGSGSESKSTDILLTQSPGILSVSPGERVSFSCRARQSIGTAIHWYQQRTNGSPRLLIKYASESISGIPSRFSGSGSGTDFTLTINSVESEDIADYYCQQSNSWPYTFGGGTKLEIKGPGGQHHHHHHGAYPYDVPDYAS

SEQ ID NO: 105 - protein, 262 aa, synthetic construct
  REGION 1..262: note = Description of Artificial Sequence: Synthetic polypeptide
EVQLVESGGGLVKPGGSLRLSCAASGFTFSRYNMNWVRQAPGKGLEWVSSISTSSNYIYYADSVKGRFTFSRDNAKNSLDLQMSGLRAEDTAIYYCTRGWGPFDYWGQGTLVTVSSGTEGKSSGSGSESKSTDIQMTQSPSSLSASVGDRVTITCRARQSIGTAIHWYQQKPGKAPKLLIYYASESISGVPSRFSGSGSGTDFTLTISSLQPEDFATYYCQQSNSWPYTFGQGTKLEIKGPGGQHHHHHHGAYPYDVPDYAS

SEQ ID NO: 106 - protein, 262 aa, synthetic construct
  REGION 1..262: note = Description of Artificial Sequence: Synthetic polypeptide
EVQLVESGGGLVKPGGSLRLSCAASGFTFSRYNMNWVRQAPGKGLEWVSSISTSSNYIYYADSVKGRFTFSRDNAKNSLDLQMSGLRAEDTAIYYCTRGWGPFDYWGQGTLVTVSSGTEGKSSGSGSESKSTDIQMTQSPSSLSASVGDRVTITCRARQSIGTAIHWYQQKPGKAPKLLIKYASESISGVPSRFSGSGSGTDFTLTISSLQPEDFATYYCQQSNSWPYTFGQGTKLEIKGPGGQHHHHHHGAYPYDVPDYAS

SEQ ID NO: 107 - protein, 262 aa, synthetic construct
  REGION 1..262: note = Description of Artificial Sequence: Synthetic polypeptide
EVQLVESGGGLVKPGGSLRLSCAASGFTFSRYNMNWVRQAPGKGLEWVSSISTSSNYIYYADSVKGRFTFSRDNAKNSLDLQMSGLRAEDTAIYYCTRGWGPFDYWGQGTLVTVSSGTEGKSSGSGSESKSTDIQMTQSPSSLSASVGDRVTITCRARQSIGTAIHWYQQKPGKAPKLLIKYASESISGVPSRFSGSGSGTDFTLTISSVQPEDFATYYCQQSNSWPYTFGQGTKLEIKGPGGQHHHHHHGAYPYDVPDYAS

SEQ ID NO: 108 - protein, 262 aa, synthetic construct
  REGION 1..262: note = Description of Artificial Sequence: Synthetic polypeptide
EVQLVESGGGLVKPGGSLRLSCAASGFTFSRYNMNWVRQAPGKGLEWVSSISTSSNYIYYADSVKGRFTFSRDNAKNSLDLQMSGLRAEDTAIYYCTRGWGPFDYWGQGTLVTVSSGTEGKSSGSGSESKSTDIQMTQSPSSLSASVGDRVTITCRARQSIGTAIHWYQQKPGKAPKLLIYYASESISGVPSRFSGSGSGTDFTLTISSVQPEDFATYYCQQSGSWPYTFGQGTKLEIKGPGGQHHHHHHGAYPYDVPDYAS

SEQ ID NO: 109 - protein, 262 aa, synthetic construct
  REGION 1..262: note = Description of Artificial Sequence: Synthetic polypeptide
EVQLVESGGGLVKPGGSLRLSCAASGFTFSRYNMNWVRQAPGKGLEWVSSISTSSNYIYYADSVKGRFTFSRDNAKNSLDLQMSGLRAEDTAIYYCTRGWGPFDYWGQGTLVTVSSGTEGKSSGSGSESKSTDIQMTQSPSSLSASVGDRVTITCRARQSIGTAIHWYQQKPGKAPKLLIKYASESISGVPSRFSGSGSGTDFTLTISSLQPEDFATYYCQQSGSWPYTFGQGTKLEIKGPGGQHHHHHHGAYPYDVPDYAS

SEQ ID NO: 110 - protein, 262 aa, synthetic construct
  REGION 1..262: note = Description of Artificial Sequence: Synthetic polypeptide
EVQLVESGGGLVKPGGSLRLSCAASGFTFSRYNMNWVRQAPGKGLEWVSSISTSSNYIYYADSVKGRFTFSRDNAKNSLDLQMSGLRAEDTAIYYCTRGWGPFDYWGQGTLVTVSSGTEGKSSGSGSESKSTDIQMTQSPSSLSASVGDRVTITCRARQSIGTAIHWYQQKPGKAPKLLIKYASESISGVPSRFSGSGSGTDFTLTISSVQPEDFATYYCQQSGSWPYTFGQGTKLEIKGPGGQHHHHHHGAYPYDVPDYAS

SEQ ID NO: 111 - protein, 262 aa, synthetic construct
  REGION 1..262: note = Description of Artificial Sequence: Synthetic polypeptide
EVQLVESGGGLVKPGGSLRLSCAASGFTFSRYNMNWVRQAPGKGLEWVSSISTSSNYIYYADSVKGRFTFSRDNAKNSLDLQMSGLRAEDTAIYYCTRGWGPFDYWGQGTLVTVSSGTEGKSSGSGSESKSTDIQMTQSPSSLSASVGDRVTITCRARQSIGTAIHWYQQKPGKAPKLLIYYASESISGVPSRFSGSGSGTDFTLTISSLQPEDFATYYCQQSGSWPYTFGQGTKLEIKGPGGQHHHHHHGAYPYDVPDYAS

SEQ ID NO: 112 - protein, 262 aa, synthetic construct
  REGION 1..262: note = Description of Artificial Sequence: Synthetic polypeptide
EVQLVESGGGLVKPGGSLRLSCAASGFTFSRYNMNWVRQAPGKGLEWVSSISTSSNYIYYADSVKGRFTFSRDNAKNSLDLQMSGLRAEDTAIYYCTRGWGPFDYWGQGTLVTVSSGTEGKSSGSGSESKSTDILLTQSPGILSVSPGERVSFSCRARQSIGTAIHWYQQRTNGSPRLLIKYASESISGIPSRFSGSGSGTDFTLTINSVESEDIADYYCQQSGSWPYTFGGGTKLEIKGPGGQHHHHHHGAYPYDVPDYAS

SEQ ID NO: 113 - DNA, 348 bp, synthetic construct
  misc_feature 1..348: note = Description of Artificial Sequence: Synthetic polynucleotide
  source 1..348: mol_type = other DNA
gaggtgcaactggtggagtctgggggaggcctggtcaagcctggggggtccctgagactctcctgtgcagcctctggattcaccttcagtagatataacatgaactgggtccgccaggctccagggaaggggctggagtgggtctcatccattagtactagtagtaattacatatactacgcagactcagtgaagggccgattcaccttctccagagacaacgccaagaactcactggatctgcaaatgagcggcctgagagccgaggacacggctatttattactgtacgagaggctgggggccttttgactactggggccagggaaccctggtcaccgtctcctca

SEQ ID NO: 114 - DNA, 321 bp, synthetic construct
  misc_feature 1..321: note = Description of Artificial Sequence: Synthetic polynucleotide
  source 1..321: mol_type = other DNA
gacatccagatgacacagtcaccttctagtttgtctgcttctgtaggcgaccgtgtaactatcacctgtcgagcccgtcaaagtattggtactgccattcactggtaccaacaaaaacctggcaaagctccaaaactcttgatctactatgcctccgaaagcatatcaggggtcccaagcagattctcaggcagtggcagtggcactgacttcactctcaccatttctagcgtgcaaccagaggacttcgccacttattactgccaacagtcagggagctggccctacaccttcggccaaggtacaaaactggagatcaaa

SEQ ID NO: 115 - DNA, 321 bp, synthetic construct
  misc_feature 1..321: note = Description of Artificial Sequence: Synthetic polynucleotide
  source 1..321: mol_type = other DNA
gacatacaaatgacacaatcaccctcttctctttctgcaagcgttggcgaccgtgtcactatcacttgtcgagcccgccagtccataggtactgccattcactggtatcaacagaagcctggcaaggctcccaaactcctgattaagtatgccagcgagagcatttccggcgtaccttcaagattttccggctccggtagtgggacagatttcactctcactatatctagcctccaaccagaagatttcgccacttactactgtcaacaatcaggttcatggccttacactttcggccaggggacaaaattggagatcaag

SEQ ID NO: 116 - DNA, 321 bp, synthetic construct
  misc_feature 1..321: note = Description of Artificial Sequence: Synthetic polynucleotide
  source 1..321: mol_type = other DNA
gacatccaaatgactcaatcacctagcagcctctccgcctccgttggagatagagtgacaataacttgccgagcccggcaaagtatcggaactgctattcactggtatcaacaaaaacctggaaaggcacctaagctcttgattaaatacgcttctgagtccatctccggcgtgccttcacgattcagcggcagcggtagtggtactgactttaccctcactattagttctgttcagccagaggacttcgcaacttattactgccaacagagtggttcctggccatacacttttggccaggggactaaattggaaatcaaa

SEQ ID NO: 117 - DNA, 321 bp, synthetic construct
  misc_feature 1..321: note = Description of Artificial Sequence: Synthetic polynucleotide
  source 1..321: mol_type = other DNA
gacatccaaatgactcaaagcccctctagtttgagtgcatctgtaggtgaccgggtaacaatcacctgccgtgcccggcaaagtataggtactgcaatccactggtaccagcaaaaacccggcaaagcaccaaagctgctcatatactatgctagtgagagcatttctggcgttcctagtcgattttctggatcagggagtggaactgattttacactgacaatcagcagcctccaacccgaagacttcgccacctactattgtcagcagtctgggtcctggccttacacattcggtcaaggaactaaattggagatcaaa

SEQ ID NO: 118 - DNA, 321 bp, synthetic construct
  misc_feature 1..321: note = Description of Artificial Sequence: Synthetic polynucleotide
  source 1..321: mol_type = other DNA
gacattttgctgacacagagccctggtatcctctcagtcagtccaggggaacgcgtttcatttagctgccgtgctcgacagagcattgggaccgcaatccactggtaccaacaaagaactaacggttcaccacggcttttgattaagtatgcctccgaatccatcagtggcattcctagtcgtttttctggatcaggatcaggcaccgactttactctcacaattaatagtgtcgaaagtgaggacattgcagactattattgtcagcaatccggttcctggccctatacttttggtggtggtactaagttggaaattaaa

SEQ ID NO: 119 - protein, 107 aa, synthetic construct
  REGION 1..107: note = Description of Artificial Sequence: Synthetic polypeptide
DILLTQSPGILSVSPGERVSFSCRARQSIGTAIHWYQQRTNGSPRLLIKYASESISGIPSRFSGSGSGTDFTLTINSVESEDIADYYCQQSNSWPYTFGGGTKLEIK

SEQ ID NO: 120 - DNA, 321 bp, synthetic construct
  misc_feature 1..321: note = Description of Artificial Sequence: Synthetic polynucleotide
  source 1..321: mol_type = other DNA
gatatacttcttacccagagtcccggcatcctctccgttagccctggggagagagtctcattctcatgccgagccagacagtcaattggtaccgcaatacactggtatcaacagcggaccaatggttctccccgacttctgataaagtacgcatcagaatcaattagtggaataccatcaagatttagtggctcagggagtggaaccgattttactctgaccatcaactcagtggaatctgaggacattgccgactactactgtcaacaaagcaatagttggccatataccttcggaggcggaactaaattggagataaaa

SEQ ID NO: 121 - protein, 9 aa, synthetic construct
  REGION 1..9: note = Description of Artificial Sequence: Synthetic peptide
QQSNSWPYT

SEQ ID NO: 122 - protein, 6 aa, synthetic construct
  REGION 1..6: note = Description of Artificial Sequence: Synthetic peptide
SNSWPY

SEQ ID NO: 123 - protein, 9 aa, synthetic construct
  REGION 1..9: note = Description of Artificial Sequence: Synthetic peptide
QQSNSWPYT

SEQ ID NO: 124 - protein, 117 aa, synthetic construct
  REGION 1..117: note = Description of Artificial Sequence: Synthetic polypeptide
QVQLQESGPGLVKPSDTLSLTCAVSGNSITSDYAWNWIRQPPGKGLEWIGYISYSGSTTYNPSLKSRVTMSRDTSKNQFSLKLSSVTAVDTAVYYCATGYYYGSGFWGQGTLVTVSS

SEQ ID NO: 125 - protein, 111 aa, synthetic construct
  REGION 1..111: note = Description of Artificial Sequence: Synthetic polypeptide
DIVLTQSPDSLAVSLGERATINCKASESVEYFGTSLMHWYQQKPGQPPKLLIYAASNRESGVPDRFSGSGSGTDFTLTISSLQAEDVAVYYCQQTRKVPYTFGQGTKLEIK

SEQ ID NO: 126 - protein, 117 aa, synthetic construct
  REGION 1..117: note = Description of Artificial Sequence: Synthetic polypeptide
DVQLQESGPGLVKPSQSLSLTCTVTGNSITSDYAWNWIRQFPGNRLEWMGYISYSGSTTYSPSLKSRFSITRDTSKNQFFLQLNSVTPEDTATYFCATGYYYGSGFWGQGTLVTVSS

SEQ ID NO: 127 - protein, 111 aa, synthetic construct
  REGION 1..111: note = Description of Artificial Sequence: Synthetic polypeptide
DIVLTQSPASLAVSLGQRATISCRASESVEYFGTSLMHWYRQKPGQPPKLLIYAASNVESGVPARFSGSGSGTDFSLNIQPVEEDDFSMYFCQQTRKVPYTFGGGTKLEIK

SEQ ID NO: 128 - protein, 117 aa, synthetic construct
  REGION 1..117: note = Description of Artificial Sequence: Synthetic polypeptide
QVQLQESGPGLVKPSDTLSLTCAVSGNSITSDYAWNWIRQFPGKGLEWIGYISYSGSTTYNPSLKSRVTISRDTSKNQFSLKLSSVTPVDTAVYYCATGYYYGSGFWGQGTLVTVSS

SEQ ID NO: 129 - protein, 111 aa, synthetic construct
  REGION 1..111: note = Description of Artificial Sequence: Synthetic polypeptide
DIVLTQSPDSLAVSLGERATINCKASESVEYFGTSLMHWYQQKPGQPPKLLIYAASNRESGVPDRFSGSGSGTDFTLTIQSVQAEDVSVYFCQQTRKVPYTFGQGTKLEIK

SEQ ID NO: 130 - protein, 117 aa, synthetic construct
  REGION 1..117: note = Description of Artificial Sequence: Synthetic polypeptide
QVQLQESGPGLVKPSDTLSLTCAVSGNSITSDYAWNWIRQFPGKGLEWMGYISYSGSTTYNPSLKSRVTISRDTSKNQFSLKLSSVTPVDTAVYYCATGYYYGSGFWGQGTLVTVSS

SEQ ID NO: 131 - protein, 111 aa, synthetic construct
  REGION 1..111: note = Description of Artificial Sequence: Synthetic polypeptide
DIVLTQSPDSLAVSLGERATINCKASESVEYFGTSLMHWYQQKPGQPPKLLIYAASNRESGVPDRFSGSGSGTDFTLTISSVQAEDVAVYYCQQTRKVPYTFGQGTKLEIK

SEQ ID NO: 132 - protein, 117 aa, synthetic construct
  REGION 1..117: note = Description of Artificial Sequence: Synthetic polypeptide
QVQLQESGPGLVKPSQTLSLTCTVSGNSITSDYAWNWIRQFPGKGLEWIGYISYSGSTTYNPSLKSRVTISRDTSKNQFSLKLSSVTAADTAVYYCATGYYYGSGFWGQGTLVTVSS

SEQ ID NO: 133 - protein, 111 aa, synthetic construct
  REGION 1..111: note = Description of Artificial Sequence: Synthetic polypeptide
DIVLTQSPDSLAVSLGERATINCRASESVEYFGTSLMHWYQQKPGQPPKLLIYAASNVESGVPDRFSGSGSGTDFTLTISSLQAEDVAVYFCQQTRKVPYTFGGGTKVEIK

SEQ ID NO: 134 - protein, 117 aa, synthetic construct
  REGION 1..117: note = Description of Artificial Sequence: Synthetic polypeptide
QVQLQESGPGLVKPSQTLSLTCTVSGNSITSDYAWNWIRQPPGKGLEWIGYISYSGSTTYNPSLKSRVTISRDTSKNQFSLKLSSVTAADTAVYYCATGYYYGSGFWGQGTLVTVSS

SEQ ID NO: 135 - protein, 111 aa, synthetic construct
  REGION 1..111: note = Description of Artificial Sequence: Synthetic polypeptide
EIVLTQSPATLSLSPGERATLSCRASESVEYFGTSLMHWYQQKPGQPPRLLIYAASNVESGIPARFSGSGSGTDFTLTISSVEPEDFAVYFCQQTRKVPYTFGGGTKVEIK

SEQ ID NO: 136 - protein, 117 aa, synthetic construct
  REGION 1..117: note = Description of Artificial Sequence: Synthetic polypeptide
QVQLQESGPGLVKPSQTLSLTCTVSGNSITSDYAWNWIRQFPGKRLEWIGYISYSGSTTYNPSLKSRVTISRDTSKNQFSLKLSSVTAADTAVYYCATGYYYGSGFWGQGTLVTVSS

SEQ ID NO: 137 - protein, 124 aa, synthetic construct
  REGION 1..124: note = Description of Artificial Sequence: Synthetic polypeptide
EVQLVESGGGLVQPGGSLRLSCAASGFTFSSYWMTWVRQAPGKGLEWVANIKQDGSERYYVDSVKGRFTISRDNAKNSLYLQMNSLRAEDTAVYYCARDQNYDILTGHYGMDVWGQGTTVTVSS

SEQ ID NO: 138 - protein, 107 aa, synthetic construct
  REGION 1..107: note = Description of Artificial Sequence: Synthetic polypeptide
EIVLTQSPSFLSASVGDRVTITCRASQGISSYLSWYQQKPGKAPKLLIYATSTLQSGVPSRFSGSGSGTEFTLTISSLQPEDFATYYCQQLNSYPRTFGQGTKVEIK

SEQ ID NO: 139 - protein, 125 aa, synthetic construct
  REGION 1..125: note = Description of Artificial Sequence: Synthetic polypeptide
QVQLQESGPGLVKPSETLSLTCTVSGGSISSYYWSWIRQPPGKGLEWIGYIYYSGSTNYNPSLKSRVTISVDTSKNQFSLKLSSVTAADTAVYYCAGTTIFGVVTPNFYYGMDVWGQGTTVTVSS

SEQ ID NO: 140 - protein, 107 aa, synthetic construct
  REGION 1..107: note = Description of Artificial Sequence: Synthetic polypeptide
DIQMTQSPSFLSASVGDRVTITCRASQGISSYLAWYQQKPGKAPKFLIYAASTLQSGVPSRFSGSGSGTEFTLTISSLQPEDFATYYCQQLNSYPLTFGGGTKVEIK

SEQ ID NO: 141 - protein, 123 aa, synthetic construct
  REGION 1..123: note = Description of Artificial Sequence: Synthetic polypeptide
EVQLVESGGGVVQPGRSLRLSCVASGFTFSSYDIHWVRQAPGKGLEWVAIISYDGSKKDYTDSVKGRFTISRDNSKNTLYLQMDSLRVEDSAVYSCARESGWSHYYYYGMDVWGQGTMVTVSS

SEQ ID NO: 142 - protein, 107 aa, synthetic construct
  REGION 1..107: note = Description of Artificial Sequence: Synthetic polypeptide
DIVMTQSPSSLSASVGDRVTITCRASQDISNYLAWYQQKPGKVPKFLIYAASTLHSGVPSRFSGSGSGTDFTLTISSLQPEDVATYYCQKYNSAPYTFGQGTRLEIK

SEQ ID NO: 143 - protein, 119 aa, synthetic construct
  REGION 1..119: note = Description of Artificial Sequence: Synthetic polypeptide
QVQLQESGPGLVKPSETLSLTCTVSGGSISSYYWSWLRQPAGSGLEWIGRLYVSGFTNYNPSLKSRVTLSLDPSRNQLSLKLSSVTAADTAVYYCAGDSGNYWGWFDPWGQGTLVTVSS

SEQ ID NO: 144 - protein, 106 aa, synthetic construct
  REGION 1..106: note = Description of Artificial Sequence: Synthetic polypeptide
SYELTQPPSVSVSPGETASITCSGDQLGENYACWYQQKPGQSPVLVIYQDSKRPSGIPERFSGSNSGNTATLTISGTQALDEADYYCQAWDNSIVVFGGGTKLTVL

SEQ ID NO: 145 - protein, 121 aa, synthetic construct
  REGION 1..121: note = Description of Artificial Sequence: Synthetic polypeptide
QVQLVESGGGVVQPGRSLRLSCAASGFTFSYYGMHWVRQAPGKGLEWVAFISYDGSNKYYADSVKGRFTISRDNSKNTLYLQMNSLRAEDTAVYYCAHLPYSGSYWAFDYWGQGTQVTVSS

SEQ ID NO: 146 - protein, 108 aa, synthetic construct
  REGION 1..108: note = Description of Artificial Sequence: Synthetic polypeptide
QSVLTQPPSVSVAPGQTASITCGGDNIGSKSVHWYQQKPGQAPVLVVYDNSDRPSGIPERFSGSNSGTTATLTISRVEAGDEADYYCQVWDSSSDHPVVFGGGTKVTV

SEQ ID NO: 147 - protein, 125 aa, synthetic construct
  REGION 1..125: note = Description of Artificial Sequence: Synthetic polypeptide
QVQLVESGGGLVQPGGSLRLSCAASGFTFSHYAMSWVRQAPGKGLEWVSTIGGSGGSTYYADSVKGRFTISRDNSKNTLYLQMNSLRAEDTAVYYCAKPHIVMVTALLYDGMDVWGQGTMVTVSS

SEQ ID NO: 148 - protein, 108 aa, synthetic construct
  REGION 1..108: note = Description of Artificial Sequence: Synthetic polypeptide
SSELTQPPSVSVAPGQTARITCGGNNIGSKSVHWYQQKPGQAPVLVVYDDSDRPSGIPERFSGSNSGNTATLTISRVEAGDEADYYCQVWDSSSDHVVFGGGTKLTVL

SEQ ID NO: 149 - protein, 6 aa, synthetic construct
  REGION 1..6: note = Description of Artificial Sequence: Synthetic peptide
SDYAWN

SEQ ID NO: 150 - protein, 16 aa, synthetic construct
  REGION 1..16: note = Description of Artificial Sequence: Synthetic peptide
YISYSGSTTYSPSLKS

SEQ ID NO: 151 - protein, 8 aa, synthetic construct
  REGION 1..8: note = Description of Artificial Sequence: Synthetic peptide
GYYYGSGF

SEQ ID NO: 152 - protein, 16 aa, synthetic construct
  REGION 1..16: note = Description of Artificial Sequence: Synthetic peptide
YISYSGSTTYNPSLKS

SEQ ID NO: 153 - protein, 5 aa, synthetic construct
  REGION 1..5: note = Description of Artificial Sequence: Synthetic peptide
SYWMT

SEQ ID NO: 154 - protein, 17 aa, synthetic construct
  REGION 1..17: note = Description of Artificial Sequence: Synthetic peptide
NIKQDGSERYYVDSVKG

SEQ ID NO: 155 - protein, 15 aa, synthetic construct
  REGION 1..15: note = Description of Artificial Sequence: Synthetic peptide
DQNYDILTGHYGMDV

SEQ ID NO: 156 - protein, 5 aa, synthetic construct
  REGION 1..5: note = Description of Artificial Sequence: Synthetic peptide
SYYWS

SEQ ID NO: 157 - protein, 16 aa, synthetic construct
  REGION 1..16: note = Description of Artificial Sequence: Synthetic peptide
YIYYSGSTNYNPSLKS

SEQ ID NO: 158 - protein, 17 aa, synthetic construct
  REGION 1..17: note = Description of Artificial Sequence: Synthetic peptide
TTIFGVVTPNFYYGMDV

SEQ ID NO: 159 - protein, 5 aa, synthetic construct
  REGION 1..5: note = Description of Artificial Sequence: Synthetic peptide
SYDIH

SEQ ID NO: 160 - protein, 17 aa, synthetic construct
  REGION 1..17: note = Description of Artificial Sequence: Synthetic peptide
IISYDGSKKDYTDSVKG

SEQ ID NO: 161 - protein, 14 aa, synthetic construct
  REGION 1..14: note = Description of Artificial Sequence: Synthetic peptide
ESGWSHYYYYGMDV

SEQ ID NO: 162 - protein, 5 aa, synthetic construct
  REGION 1..5: note = Description of Artificial Sequence: Synthetic peptide
SYYWS

SEQ ID NO: 163 - protein, 16 aa, synthetic construct
  REGION 1..16: note = Description of Artificial Sequence: Synthetic peptide
RLYVSGFTNYNPSLKS

SEQ ID NO: 164 - protein, 11 aa, synthetic construct
  REGION 1..11: note = Description of Artificial Sequence: Synthetic peptide
DSGNYWGWFDP

SEQ ID NO: 165 - protein, 5 aa, synthetic construct
  REGION 1..5: note = Description of Artificial Sequence: Synthetic peptide
YYGMH

SEQ ID NO: 166 - protein, 17 aa, synthetic construct
  REGION 1..17: note = Description of Artificial Sequence: Synthetic peptide
FISYDGSNKYYADSVKG

SEQ ID NO: 167 - protein, 12 aa, synthetic construct
  REGION 1..12: note = Description of Artificial Sequence: Synthetic peptide
LPYSGSYWAFDY

SEQ ID NO: 168 - protein, 5 aa, synthetic construct
  REGION 1..5: note = Description of Artificial Sequence: Synthetic peptide
HYAMS

SEQ ID NO: 169 - protein, 17 aa, synthetic construct
  REGION 1..17: note = Description of Artificial Sequence: Synthetic peptide
TIGGSGGSTYYADSVKG

SEQ ID NO: 170 - protein, 16 aa, synthetic construct
  REGION 1..16: note = Description of Artificial Sequence: Synthetic peptide
PHIVMVTALLYDGMDV

SEQ ID NO: 171 - protein, 15 aa, synthetic construct
  REGION 1..15: note = Description of Artificial Sequence: Synthetic peptide
RASESVEYFGTSLMH

SEQ ID NO: 172 - protein, 7 aa, synthetic construct
  REGION 1..7: note = Description of Artificial Sequence: Synthetic peptide
AASNVES

SEQ ID NO: 173 - protein, 9 aa, synthetic construct
  REGION 1..9: note = Description of Artificial Sequence: Synthetic peptide
QQTRKVPYT

SEQ ID NO: 174 - protein, 15 aa, synthetic construct
  REGION 1..15: note = Description of Artificial Sequence: Synthetic peptide
KASESVEYFGTSLMH

SEQ ID NO: 175 - protein, 7 aa, synthetic construct
  REGION 1..7: note = Description of Artificial Sequence: Synthetic peptide
AASNRES

SEQ ID NO: 176 - protein, 11 aa, synthetic construct
  REGION 1..11: note = Description of Artificial Sequence: Synthetic peptide
RASQGISSYLS

SEQ ID NO: 177 - protein, 7 aa, synthetic construct
  REGION 1..7: note = Description of Artificial Sequence: Synthetic peptide
ATSTLQS

SEQ ID NO: 178 - protein, 9 aa, synthetic construct
  REGION 1..9: note = Description of Artificial Sequence: Synthetic peptide
QQLNSYPRT

SEQ ID NO: 179 - protein, 11 aa, synthetic construct
  REGION 1..11: note = Description of Artificial Sequence: Synthetic peptide
RASQDISNYLA

SEQ ID NO: 180 - protein, 7 aa, synthetic construct
  REGION 1..7: note = Description of Artificial Sequence: Synthetic peptide
AASTLHS

SEQ ID NO: 181 - protein, 9 aa, synthetic construct
  REGION 1..9: note = Description of Artificial Sequence: Synthetic peptide
QKYNSAPYT

SEQ ID NO: 182 - protein, 11 aa, synthetic construct
  REGION 1..11: note = Description of Artificial Sequence: Synthetic peptide
RASQGISSYLA

SEQ ID NO: 183 - protein, 7 aa, synthetic construct
  REGION 1..7: note = Description of Artificial Sequence: Synthetic peptide
AASTLQS

SEQ ID NO: 184 - protein, 9 aa, synthetic construct
  REGION 1..9: note = Description of Artificial Sequence: Synthetic peptide
QQLNSYPLT

SEQ ID NO: 185 - protein, 11 aa, synthetic construct
  REGION 1..11: note = Description of Artificial Sequence: Synthetic peptide
SGDQLGENYAC

SEQ ID NO: 186 - protein, 7 aa, synthetic construct
  REGION 1..7: note = Description of Artificial Sequence: Synthetic peptide
QDSKRPS

SEQ ID NO: 187 - protein, 9 aa, synthetic construct
  REGION 1..9: note = Description of Artificial Sequence: Synthetic peptide
QAWDNSIVV

SEQ ID NO: 188 - protein, 11 aa, synthetic construct
  REGION 1..11: note = Description of Artificial Sequence: Synthetic peptide
QVWDSSSDHVV

SEQ ID NO: 189 - protein, 10 aa, synthetic construct
  REGION 1..10: note = Description of Artificial Sequence: Synthetic peptide
GFTFSSYWMT

SEQ ID NO: 190 - protein, 10 aa, synthetic construct
  REGION 1..10: note = Description of Artificial Sequence: Synthetic peptide
NIKQDGSERY

SEQ ID NO: 191 - protein, 11 aa, synthetic construct
  REGION 1..11: note = Description of Artificial Sequence: Synthetic peptide
GGNNIGSKSVH

SEQ ID NO: 192 - protein, 7 aa, synthetic construct
  REGION 1..7: note = Description of Artificial Sequence: Synthetic peptide
DDSDRPS

SEQ ID NO: 193 - protein, 12 aa, synthetic construct
  REGION 1..12: note = Description of Artificial Sequence: Synthetic peptide
QVWDSSSDHPVV

SEQ ID NO: 194 - protein, 11 aa, synthetic construct
  REGION 1..11: note = Description of Artificial Sequence: Synthetic peptide
GNSITSDYAWN

SEQ ID NO: 195 - protein, 9 aa, synthetic construct
  REGION 1..9: note = Description of Artificial Sequence: Synthetic peptide
YISYSGSTT

SEQ ID NO: 196 - protein, 10 aa, synthetic construct
  REGION 1..10: note = Description of Artificial Sequence: Synthetic peptide
GFTFSSYDIH

SEQ ID NO: 197 - protein, 10 aa, synthetic construct
  REGION 1..10: note = Description of Artificial Sequence: Synthetic peptide
IISYDGSKKD

SEQ ID NO: 198 - protein, 10 aa, synthetic construct
  REGION 1..10: note = Description of Artificial Sequence: Synthetic peptide
GGSISSYYWS

SEQ ID NO: 199 - protein, 9 aa, synthetic construct
  REGION 1..9: note = Description of Artificial Sequence: Synthetic peptide
RLYVSGFTN

SEQ ID NO: 200 - protein, 7 aa, synthetic construct
  REGION 1..7: note = Description of Artificial Sequence: Synthetic peptide
GFTFSYY

SEQ ID NO: 201 - protein, 10 aa, synthetic construct
  REGION 1..10: note = Description of Artificial Sequence: Synthetic peptide
FISYDGSNKY

SEQ ID NO: 202 - protein, 10 aa, synthetic construct
  REGION 1..10: note = Description of Artificial Sequence: Synthetic peptide
GGSISSYYWS

SEQ ID NO: 203 - protein, 9 aa, synthetic construct
  REGION 1..9: note = Description of Artificial Sequence: Synthetic peptide
YIYYSGSTN

SEQ ID NO: 204 - protein, 10 aa, synthetic construct
  REGION 1..10: note = Description of Artificial Sequence: Synthetic peptide
GFTFSHYAMS

SEQ ID NO: 205 - protein, 11 aa, synthetic construct
  REGION 1..11: note = Description of Artificial Sequence: Synthetic peptide
TIGGSGGSTYY

SEQ ID NO: 206 - protein, 16 aa, synthetic construct
  REGION 1..16: note = Description of Artificial Sequence: Synthetic peptide
PHIVMVTALLYDGMDV

SEQ ID NO: 207 - protein, 447 aa, synthetic construct
  REGION 1..447: note = Description of Artificial Sequence: Synthetic polypeptide
DVQLQESGPGLVKPSQSLSLTCTVTGNSITSDYAWNWIRQFPGNRLEWMGYISYSGSTTYSPSLKSRFSITRDTSKNQFFLQLNSVTPEDTATYFCATGYYYGSGFWGQGTLVTVSSAKTTAPSVYPLAPVCGDTTGSSVTLGCLVKGYFPEPVTLTWNSGSLSSGVHTFPAVLQSDLYTLSSSVTVTSSTWPSQSITCNVAHPASSTKVDKKIEPRGPTIKPCPPCKCPAPNLLGGPSVFIFPPKIKDVLMISLSPIVTCVVVDVSEDDPDVQISWFVNNVEVHTAQTQTHREDYNSTLRVVSALPIQHQDWMSGKEFKCKVNNKDLPAPIERTISKPKGSVRAPQVYVLPPPEEEMTKKQVTLTCMVTDFMPEDIYVEWTNNGKTELNYKNTEPVLDSDGSYFMYSKLRVEKKNWVERNSYSCSVVHEGLHNHHTTKSFSRTPGK

SEQ ID NO: 208 - protein, 447 aa, synthetic construct
  REGION 1..447: note = Description of Artificial Sequence: Synthetic polypeptide
QVQLQESGPGLVKPSDTLSLTCAVSGNSITSDYAWNWIRQPPGKGLEWIGYISYSGSTTYNPSLKSRVTMSRDTSKNQFSLKLSSVTAVDTAVYYCATGYYYGSGFWGQGTLVTVSSASTKGPSVFPLAPSSKSTSGGTAALGCLVKDYFPEPVTVSWNSGALTSGVHTFPAVLQSSGLYSLSSVVTVPSSSLGTQTYICNVNHKPSNTKVDKKVEPKSCDKTHTCPPCPAPELLGGPSVFLFPPKPKDTLMISRTPEVTCVVVDVSHEDPEVKFNWYVDGVEVHNAKTKPREEQYNSTYRVVSVLTVLHQDWLNGKEYKCKVSNKALPAPIEKTISKAKGQPREPQVYTLPPSREEMTKNQVSLTCLVKGFYPSDIAVEWESNGQPENNYKTTPPVLDSDGSFFLYSKLTVDKSRWQQGNVFSCSVMHEALHNHYTQKSLSLSPGK

SEQ ID NO: 209 - protein, 5 aa, synthetic construct
  REGION 1..5: note = Description of Artificial Sequence: Synthetic peptide
KVTEF

SEQ ID NO: 210 - protein, 452 aa, synthetic construct
  REGION 1..452: note = Description of Artificial Sequence: Synthetic polypeptide
QVQLQESGPGLVKPSETLSLTCTVSGGSISSYYWSWIRQPPGKGLEWIGYIYYSGSTNYNPSLKSRVTISVDTSKNQFSLKLSSVTAADTAVYYCAGTTIFGVVTPNFYYGMDVWGQGTTVTVSSASTKGPSVFPLAPCSRSTSESTAALGCLVKDYFPEPVTVSWNSGALTSGVHTFPAVLQSSGLYSLSSVVTVPSSSLGTKTYTCNVDHKPSNTKVDKRVESKYGPPCPPCPAPEAAGGPSVFLFPPKPKDTLMISRTPEVTCVVVDVSQEDPEVQFNWYVDGVEVHNAKTKPREEQFNSTYRVVSVLTVLHQDWLNGKEYKCKVSNKGLPSSIEKTISKAKGQPREPQVYTLPPSQEEMTKNQVSLTCLVKGFYPSDIAVEWESNGQPENNYKTTPPVLDSDGSFFLYSRLTVDKSRWQEGNVFSCSVMHEALHNHYTQKSLSLSLGK

SEQ ID NO: 211 - protein, 450 aa, synthetic construct
  REGION 1..450: note = Description of Artificial Sequence: Synthetic polypeptide
EVQLVESGGGVVQPGRSLRLSCVASGFTFSSYDIHWVRQAPGKGLEWVAIISYDGSKKDYTDSVKGRFTISRDNSKNTLYLQMDSLRVEDSAVYSCARESGWSHYYYYGMDVWGQGTMVTVSSASTKGPSVFPLAPCSRSTSESTAALGCLVKDYFPEPVTVSWNSGALTSGVHTFPAVLQSSGLYSLSSVVTVPSSSLGTKTYTCNVDHKPSNTKVDKRVESKYGPPCPPCPAPEAAGGPSVFLFPPKPKDTLMISRTPEVTCVVVDVSQEDPEVQFNWYVDGVEVHNAKTKPREEQFNSTYRVVSVLTVLHQDWLNGKEYKCKVSNKGLPSSIEKTISKAKGQPREPQVYTLPPSQEEMTKNQVSLTCLVKGFYPSDIAVEWESNGQPENNYKTTPPVLDSDGSFFLYSRLTVDKSRWQEGNVFSCSVMHEALHNHYTQKSLSLSLGK

SEQ ID NO: 212 - protein, 446 aa, synthetic construct
  REGION 1..446: note = Description of Artificial Sequence: Synthetic polypeptide
QVQLQESGPGLVKPSETLSLTCTVSGGSISSYYWSWLRQPAGSGLEWIGRLYVSGFTNYNPSLKSRVTLSLDPSRNQLSLKLSSVTAADTAVYYCAGDSGNYWGWFDPWGQGTLVTVSSASTKGPSVFPLAPCSRSTSESTAALGCLVKDYFPEPVTVSWNSGALTSGVHTFPAVLQSSGLYSLSSVVTVPSSSLGTKTYTCNVDHKPSNTKVDKRVESKYGPPCPPCPAPEAAGGPSVFLFPPKPKDTLMISRTPEVTCVVVDVSQEDPEVQFNWYVDGVEVHNAKTKPREEQFNSTYRVVSVLTVLHQDWLNGKEYKCKVSNKGLPSSIEKTISKAKGQPREPQVYTLPPSQEEMTKNQVSLTCLVKGFYPSDIAVEWESNGQPENNYKTTPPVLDSDGSFFLYSRLTVDKSRWQEGNVFSCSVMHEALHNHYTQKSLSLSLGK

SEQ ID NO: 213 - protein, 451 aa, synthetic construct
  REGION 1..451: note = Description of Artificial Sequence: Synthetic polypeptide
QVQLVESGGGVVQPGRSLRLSCAASGFTFSYYGMHWVRQAPGKGLEWVAFISYDGSNKYYADSVKGRFTISRDNSKNTLYLQMNSLRAEDTAVYYCAHLPYSGSYWAFDYWGQGTQVTVSSASTKGPSVFPLAPSSKSTSGGTAALGCLVKDYFPEPVTVSWNSGALTSGVHTFPAVLQSSGLYSLSSVVTVPSSSLGTQTYICNVNHKPSNTKVDKKVEPKSCDKTHTCPPCPAPEAAGGPSVFLFPPKPKDTLMISRTPEVTCVVVSVSHEDPEVKFNWYVDGVEVHNAKTKPREEQYNSTYRVVSVLTVLHQDWLNGKEYKCKVSNKALPAPIEKTISKAKGQPREPQVYTLPPSREEMTKNQVSLTCLVKGFYPSDIAVEWESNGQPENNYKTTPPVLDSDGSFFLYSKLTVDKSRWQQGNVFSCSVMHEALHNHYTQKSLSLSPGK

SEQ ID NO: 214 - protein, 218 aa, synthetic construct
  REGION 1..218: note = Description of Artificial Sequence: Synthetic polypeptide
DIVLTQSPASLAVSLGQRATISCRASESVEYFGTSLMHWYRQKPGQPPKLLIYAASNVESGVPARFSGSGSGTDFSLNIQPVEEDDFSMYFCQQTRKVPYTFGGGTKLEIKRADAAPTVSIFPPSSEQLTSGGASVVCFLNNFYPKDINVKWKIDGSERQNGVLNSWTDQDSKDSTYSMSSTLTLTKDEYERHNSYTCEATHKTSTSPIVKSFNRNEC

SEQ ID NO: 215 - protein, 218 aa, synthetic construct
  REGION 1..218: note = Description of Artificial Sequence: Synthetic polypeptide
DIVLTQSPDSLAVSLGERATINCKASESVEYFGTSLMHWYQQKPGQPPKLLIYAASNRESGVPDRFSGSGSGTDFTLTISSLQAEDVAVYYCQQTRKVPYTFGQGTKLEIKRTVAAPSVFIFPPSDEQLKSGTASVVCLLNNFYPREAKVQWKVDNALQSGNSQESVTEQDSKDSTYSLSSTLTLSKADYEKHKVYACEVTHQGLSSPVTKSFNRGEC

SEQ ID NO: 216 - protein, 5 aa, synthetic construct
  REGION 1..5: note = Description of Artificial Sequence: Synthetic peptide
HYRKW

SEQ ID NO: 217 - protein, 6 aa, synthetic construct
  REGION 1..6: note = Description of Artificial Sequence: Synthetic peptide
SHGWAH

SEQ ID NO: 218 - protein, 15 aa, synthetic construct
  REGION 1..15: note = Description of Artificial Sequence: Synthetic peptide
RHNLFEPEDTGQRVP

SEQ ID NO: 219 - protein, 455 aa, synthetic construct
  REGION 1..455: note = Description of Artificial Sequence: Synthetic polypeptide
QVQLVESGGGLVQPGGSLRLSCAASGFTFSHYAMSWVRQAPGKGLEWVSTIGGSGGSTYYADSVKGRFTISRDNSKNTLYLQMNSLRAEDTAVYYCAKPHIVMVTALLYDGMDVWGQGTMVTVSSASTKGPSVFPLAPSSKSTSGGTAALGCLVKDYFPEPVTVSWNSGALTSGVHTFPAVLQSSGLYSLSSVVTVPSSSLGTQTYICNVNHKPSNTKVDKKVEPKSCDKTHTCPPCPAPEAAGGPSVFLFPPKPKDTLMISRTPEVTCVVVSVSHEDPEVKFNWYVDGVEVHNAKTKPREEQYNSTYRVVSVLTVLHQDWLNGKEYKCKVSNKALPAPIEKTISKAKGQPREPQVYTLPPSREEMTKNQVSLTCLVKGFYPSDIAVEWESNGQPENNYKTTPPVLDSDGSFFLYSKLTVDKSRWQQGNVFSCSVMHEALHNHYTQKSLSLSPGK

SEQ ID NO: 220 - protein, 214 aa, synthetic construct
  REGION 1..214: note = Description of Artificial Sequence: Synthetic polypeptide
SSELTQPPSVSVAPGQTARITCGGNNIGSKSVHWYQQKPGQAPVLVVYDDSDRPSGIPERFSGSNSGNTATLTISRVEAGDEADYYCQVWDSSSDHVVFGGGTKLTVLGQPKAAPSVTLFPPSSEELQANKATLVCLISDFYPGAVTVAWKADSSPVKAGVETTTPSKQSNNKYAASSYLSLTPEQWKSHRSYSCQVTHEGSTVEKTVAPTECS

SEQ ID NO: 221 - protein, 214 aa, synthetic construct
  REGION 1..214: note = Description of Artificial Sequence: Synthetic polypeptide
DIQMTQSPSFLSASVGDRVTITCRASQGISSYLAWYQQKPGKAPKFLIYAASTLQSGVPSRFSGSGSGTEFTLTISSLQPEDFATYYCQQLNSYPLTFGGGTKVEIKRTVAAPSVFIFPPSDEQLKSGTASVVCLLNNFYPREAKVQWKVDNALQSGNSQESVTEQDSKDSTYSLSSTLTLSKADYEKHKVYACEVTHQGLSSPVTKSFNRGEC

SEQ ID NO: 222 - protein, 214 aa, synthetic construct
  REGION 1..214: note = Description of Artificial Sequence: Synthetic polypeptide
DIVMTQSPSSLSASVGDRVTITCRASQDISNYLAWYQQKPGKVPKFLIYAASTLHSGVPSRFSGSGSGTDFTLTISSLQPEDVATYYCQKYNSAPYTFGQGTRLEIKRTVAAPSVFIFPPSDEQLKSGTASVVCLLNNFYPREAKVQWKVDNALQSGNSQESVTEQDSKDSTYSLSSTLTLSKADYEKHKVYACEVTHQGLSSPVTKSFNRGEC

SEQ ID NO: 223 - protein, 212 aa, synthetic construct
  REGION 1..212: note = Description of Artificial Sequence: Synthetic polypeptide
SYELTQPPSVSVSPGETASITCSGDQLGENYACWYQQKPGQSPVLVIYQDSKRPSGIPERFSGSNSGNTATLTISGTQALDEADYYCQAWDNSIVVFGGGTKLTVLGQPKAAPSVTLFPPSSEELQANKATLVCLISDFYPGAVTVAWKADSSPVKAGVETTTPSKQSNNKYAASSYLSLTPEQWKSHRSYSCQVTHEGSTVEKTVAPTECS

SEQ ID NO: 224 - protein, 215 aa, synthetic construct
  REGION 1..215: note = Description of Artificial Sequence: Synthetic polypeptide
QSVLTQPPSVSVAPGQTASITCGGDNIGSKSVHWYQQKPGQAPVLVVYDNSDRPSGIPERFSGSNSGTTATLTISRVEAGDEADYYCQVWDSSSDHPVVFGGGTKVTVLGQPKAAPSVTLFPPSSEELQANKATLVCLISDFYPGAVTVAWKADSSPVKAGVETTTPSKQSNNKYAASSYLSLTPEQWKSHRSYSCQVTHEGSTVEKTVAPTECS

SEQ ID NO: 225 - DNA, 351 bp, synthetic construct
  misc_feature 1..351: note = Description of Artificial Sequence: Synthetic polynucleotide
  source 1..351: mol_type = other DNA
gatgtgcagcttcaggagtctggacccggacttgttaaaccaagtcagtctctgtccctgacctgtaccgtcaccggcaacagcatcacaagcgattacgcatggaactggatcaggcagttccctggaaatcgactcgaatggatgggctacatttcatactccggttcaaccacttactctccatccttgaaatctaggttcagcatcacccgtgatacctcaaagaaccaattttttctgcaactgaatagcgtaactccagaggacacagccacatatttctgcgccactgggtattactatggctcaggtttctggggtcagggcactctcgtcaccgtcagcagc

SEQ ID NO: 226 - DNA, 351 bp, synthetic construct
  misc_feature 1..351: note = Description of Artificial Sequence: Synthetic polynucleotide
  source 1..351: mol_type = other DNA
caggtccaactgcaagagagcggaccgggcctggtaaagccatccgacacattgtccctgacgtgtgcggtaagtggaaactctatcactagcgactatgcgtggaattggataagacaaccgccgggcaaggggctggaatggataggatatatcagctattccggttctacgacatacaatccttccctgaaaagcagagtcactatgtcacgcgacacgtccaagaatcagttctcattgaaattgtcatccgtaacggccgttgacactgcggtttattattgcgcaaccggatattactacggctctggtttttggggacagggaacacttgttactgttagttca

SEQ ID NO: 227 - DNA, 351 bp, synthetic construct
  misc_feature 1..351: note = Description of Artificial Sequence: Synthetic polynucleotide
  source 1..351: mol_type = other DNA
caggtgcagctgcaggagagcggcccaggcctggtgaagccaagcgacaccctgagcctgacctgcgccgtgagcggcaacagcatcaccagcgactacgcctggaactggatccgccagttcccaggcaagggcctggagtggatcggctacatcagctacagcggcagcaccacctacaacccaagcctgaagagccgcgtcaccatcagccgcgacaccagcaagaaccagttcagcctgaagctgagcagcgtgacccctgtggacaccgccgtgtactactgcgccaccggctactactacggcagcggcttctggggccagggcaccctggtgaccgtgagcagc

SEQ ID NO: 228 - DNA, 351 bp, synthetic construct
  misc_feature 1..351: note = Description of Artificial Sequence: Synthetic polynucleotide
  source 1..351: mol_type = other DNA
caggtgcagctgcaggagagcggcccaggcctggtgaagccaagcgacaccctgagcctgacctgcgccgtgagcggcaacagcatcaccagcgactacgcctggaactggatccgccagttcccaggcaagggcctggagtggatgggctacatcagctacagcggcagcaccacctacaacccaagcctgaagagccgcgtcaccatcagccgcgacaccagcaagaaccagttcagcctgaagctgagcagcgtgacccctgtggacaccgccgtgtactactgcgccaccggctactactacggcagcggcttctggggccagggcaccctggtgaccgtgagcagc

SEQ ID NO: 229 - DNA, 351 bp, synthetic construct
  misc_feature 1..351: note = Description of Artificial Sequence: Synthetic polynucleotide
  source 1..351: mol_type = other DNA
caggttcagctgcaagagtctggaccaggcctggtcaagccctctcagaccctgtctctgacctgtaccgtgtccggcaactccatcacctctgactacgcctggaactggattcggcagttccctggcaagggccttgagtggatcggctacatctcctactccggttccaccacctacaaccccagcctgaagtcccgggtcaccatctcccgcgacacctccaagaaccagttctccctgaagctgtcctccgtgaccgctgctgataccgccgtgtactactgtgccaccggctactactacggctccggcttttggggacagggcacactggttaccgtgtctagt

SEQ ID NO: 230 - DNA, 351 bp, synthetic construct
  misc_feature 1..351: note = Description of Artificial Sequence: Synthetic polynucleotide
  source 1..351: mol_type = other DNA
caggttcagctgcaagagtctggaccaggcctggtcaagccctctcagaccctgtctctgacctgtaccgtgtccggcaactccatcacctctgactacgcctggaactggattcggcagccacctggcaagggccttgagtggatcggctacatctcctactccggttccaccacctacaaccccagcctgaagtcccgggtcaccatctcccgcgacacctccaagaaccagttctccctgaagctgtcctccgtgaccgctgctgataccgccgtgtactactgtgccaccggctactactacggctccggcttttggggacagggcacactggttaccgtgtctagt

SEQ ID NO: 231 - DNA, 351 bp, synthetic construct
  misc_feature 1..351: note = Description of Artificial Sequence: Synthetic polynucleotide
  source 1..351: mol_type = other DNA
caggttcagctgcaagagtctggaccaggcctggtcaagccctctcagaccctgtctctgacctgtaccgtgtccggcaactccatcacctctgactacgcctggaactggattcggcagttccctggcaagcgccttgagtggatcggctacatctcctactccggttccaccacctacaaccccagcctgaagtcccgggtcaccatctcccgcgacacctccaagaaccagttctccctgaagctgtcctccgtgaccgctgctgataccgccgtgtactactgtgccaccggctactactacggctccggcttttggggacagggcacactggttaccgtgtctagt

SEQ ID NO: 232 - DNA, 372 bp, synthetic construct
  misc_feature 1..372: note = Description of Artificial Sequence: Synthetic polynucleotide
  source 1..372: mol_type = other DNA
gaggtgcaacttgtggagagcggcggaggtctggtccaacccggaggaagtctccgtctctcctgtgctgctagtggcttcactttcagctcatattggatgacatgggtgagacaagccccaggaaaggggctcgagtgggtagctaacattaaacaggacggctccgaacggtactatgttgattctgtgaagggacggttcactatatccagggataatgcaaaaaattcactctatcttcaaatgaactcactcagagcagaggacactgccgtgtattattgcgccagggatcaaaattatgacatactgaccggtcattatggaatggatgtttggggccagggaacaaccgttaccgtctcaagt

SEQ ID NO: 233 - DNA, 357 bp, synthetic construct
  misc_feature 1..357: note = Description of Artificial Sequence: Synthetic polynucleotide
  source 1..357: mol_type = other DNA
caggtgcagctgcaggagtcgggcccaggactggtgaagccttcggagaccctgtccctcacctgcactgtctctggtggctccatcagtagttactattggagctggctccggcagcccgccgggtcgggactggagtggattgggcgtttatatgtcagtgggttcaccaactacaacccctccctcaagagtcgagtcaccttgtcactagacccgtccaggaaccagttgtccctgaaactgagttctgtgaccgccgcggacacggccgtatattattgtgcgggagatagtgggaactactggggttggttcgacccctggggccagggaaccctggtcaccgtctcctca

SEQ ID NO: 234 - DNA, 369 bp, synthetic construct
  misc_feature 1..369: note = Description of Artificial Sequence: Synthetic polynucleotide
  source 1..369: mol_type = other DNA
gaggtgcagctggtggagtctgggggaggcgtggtccagcctgggaggtccctgagactctcctgtgtagcctctggattcaccttcagtagttatgacatacactgggtccgccaggctccaggcaaggggctggagtgggtggcaattatttcatatgatggaagtaaaaaagactatacagactccgtgaagggccgattcaccatctccagagacaattccaagaacacgctgtatctgcaaatggacagcctgagagttgaggactcggctgtgtattcctgtgcgagagaaagtggctggtcccactactactattacggtatggacgtctggggccaagggacaatggtcaccgtctcttca

SEQ ID NO: 235 - DNA, 375 bp, synthetic construct
  misc_feature 1..375: note = Description of Artificial Sequence: Synthetic polynucleotide
  source 1..375: mol_type = other DNA
caggtgcagctggtggagtctgggggaggcttggtacagcctggggggtccctgagactctcctgtgcagcctctggattcacctttagtcattatgccatgagctgggtccgccaggctccagggaaggggctggagtgggtctcaactattggtggtagtggtggtagcacatactacgcagactccgtgaagggccggttcaccatctccagagacaattccaagaacacgctgtatctgcaaatgaacagcctgagagccgaggacacggccgtatattactgtgcgaaacctcatattgtaatggtgactgctcttctctacgacggtatggacgtctggggccaagggacaatggtcaccgtctcctca

SEQ ID NO: 236 - DNA, 324 bp, synthetic construct
  misc_feature 1..324: note = Description of Artificial Sequence: Synthetic polynucleotide
  source 1..324: mol_type = other DNA
tcttctgagctgactcagccaccctcggtgtcagtggccccaggacagacggccaggattacctgtgggggaaacaacattggaagtaaaagtgtgcactggtaccagcagaagccaggccaggcccctgtgctggtcgtctatgatgatagcgaccggccctcagggatccctgagcgattctctggctccaactctgggaacacggccaccctgaccatcagcagggtcgaagccggggatgaggccgactattactgtcaggtgtgggatagtagtagtgatcatgtggtattcggcggagggaccaagctgaccgtccta

SEQ ID NO: 237 - DNA, 333 bp, synthetic construct
  misc_feature 1..333: note = Description of Artificial Sequence: Synthetic polynucleotide
  source 1..333: mol_type = other DNA
gacattgtgctgacacagagtccagcatccttggcagtatctttggggcagcgggcaacaatttcatgccgtgcatctgaaagtgtggagtattttggaacttctcttatgcactggtatcgccagaagcctgggcagcctcccaaactccttatatatgccgcttccaacgtggagtccggagtaccagcacgcttttccggctctgggtccggcacagacttttccctcaatatccaacctgttgaagaagacgatttttccatgtatttttgccaacagacacgcaaggttccatatacattcggcggcggcactaaacttgagatcaaa

SEQ ID NO: 238 - DNA, 333 bp, synthetic construct
  misc_feature 1..333: note = Description of Artificial Sequence: Synthetic polynucleotide
  source 1..333: mol_type = other DNA
gacatagtcttgactcagagcccggattcccttgctgtgtctctgggagaacgagctacgatcaactgcaaggcaagtgaatccgtagaatacttcgggacatcattgatgcattggtatcaacagaaaccggggcaaccgcccaaattgctgatatatgcggctagtaatagagaatcaggagtaccggataggtttagtggttcaggatcaggtacagatttcaccctgacaataagtagcttgcaagccgaagacgtagcagtgtattactgccaacaaacccgaaaggtgccatatacgtttggacagggtacaaagttggaaatcaaa

SEQ ID NO: 239 - DNA, 333 bp, synthetic construct
  misc_feature 1..333: note = Description of Artificial Sequence: Synthetic polynucleotide
  source 1..333: mol_type = other DNA
gacatcgtgctgacccagagcccagacagcctggccgtgagcctgggcgagcgcgccaccatcaactgcaaggccagcgagagcgtggagtacttcggcaccagcctgatgcactggtaccagcagaagccaggccagccaccaaagctgctgatctacgctgccagcaaccgcgagagcggcgtgccagaccgcttcagcggcagcggcagcggcaccgacttcaccctgaccatccagagcgtgcaggccgaggacgtctccgtgtacttctgccagcagacccgcaaggtgccatacaccttcggccagggcaccaagctggagatcaag

SEQ ID NO: 240 - DNA, 333 bp, synthetic construct
  misc_feature 1..333: note = Description of Artificial Sequence: Synthetic polynucleotide
  source 1..333: mol_type = other DNA
gacatcgtgctgacccagagcccagacagcctggccgtgagcctgggcgagcgcgccaccatcaactgcaaggccagcgagagcgtggagtacttcggcaccagcctgatgcactggtaccagcagaagccaggccagccaccaaagctgctgatctacgctgccagcaaccgcgagagcggcgtgccagaccgcttcagcggcagcggcagcggcaccgacttcaccctgaccatcagcagcgtgcaggccgaggacgtcgccgtgtactactgccagcagacccgcaaggtgccatacaccttcggccagggcaccaagctggagatcaag

SEQ ID NO: 241 - DNA, 333 bp, synthetic construct
  misc_feature 1..333: note = Description of Artificial Sequence: Synthetic polynucleotide
  source 1..333: mol_type = other DNA
gacatcgtgctgacccagtctccagactctctggctgtgtctctgggcgagagagccaccatcaactgcagagcctccgagtccgtggaatacttcggcacctctctgatgcactggtaccagcagaagcccggccagcctcctaagctgctgatctacgccgcctccaacgtggaatctggcgtgcccgatagattttccggctctggctctggcaccgactttaccctgaccatcagctctctgcaggccgaggatgtggccgtgtacttctgtcagcagacccggaaggtgccctacacatttggcggcggaacaaaggtggaaatcaag

SEQ ID NO: 242 - DNA, 333 bp, synthetic construct
  misc_feature 1..333: note = Description of Artificial Sequence: Synthetic polynucleotide
  source 1..333: mol_type = other DNA
gagatcgtgctgacccagtctcctgccacactgtcactgtctccaggcgagagagccaccctctcttgtagagcctccgagtccgtggaatacttcggcacctctctgatgcactggtaccagcagaagcccggccagcctcctagactgctgatctacgccgcctccaacgtcgaatctggcatccccgctagattctccggctctggctctggcacagactttaccctgaccatctcctccgtggaacccgaggatttcgctgtgtacttttgccagcagacccggaaggtgccctacacatttggcggcggaacaaaggtggaaatcaag

SEQ ID NO: 243 - DNA, 321 bp, synthetic construct
  misc_feature 1..321: note = Description of Artificial Sequence: Synthetic polynucleotide
  source 1..321: mol_type = other DNA
gaaatcgtactgacccagtccccttctttcttgagtgcatcagttggggatagagtgaccattacttgtagagcatctcaaggtatttcttcatacttgtcttggtatcaacaaaaacctggcaaggcacccaaactcttgatctacgccacctctacattgcaaagtggggttccttctaggttttcaggctccggctctggtaccgagttcaccctcactataagcagtctccaacctgaagatttcgctacttattattgtcagcagcttaattcttatccccgaacctttggtcaaggaactaaggtcgagatcaaa

SEQ ID NO: 244 - DNA, 321 bp, synthetic construct
  misc_feature 1..321: note = Description of Artificial Sequence: Synthetic polynucleotide
  source 1..321: mol_type = other DNA
gacatccagatgacccagtctccttccttcctgtctgcatctgtaggagacagagtcaccatcacttgccgggccagtcagggcattagcagttatttagcctggtatcagcaaaaaccagggaaagcccctaagttcctgatctatgctgcatccactttgcaaagtggggtcccatcaaggttcagcggcagtggatctgggacagaattcactctcacaatcagcagcctgcagcctgaagattttgcaacttattactgtcaacagcttaatagttaccctctcactttcggcggagggaccaaggtggaaatcaaa

SEQ ID NO: 245 - DNA, 321 bp, synthetic construct
  misc_feature 1..321: note = Description of Artificial Sequence: Synthetic polynucleotide
  source 1..321: mol_type = other DNA
gacatcgtgatgacccagtctccatcctccctgtctgcatctgtaggagacagagtcaccatcacttgccgggcgagtcaggacattagcaattatttagcctggtatcagcagaaaccagggaaagttcctaagttcctgatctatgctgcatccactttgcactctggggtcccatctcggttcagtggcagtggatctgggacagatttcactctcaccatcagcagcctgcagcctgaagatgttgcaacttattactgtcaaaagtataacagtgccccgtacacttttggccaagggacacgactggagattaaa

SEQ ID NO: 246 - DNA, 318 bp, synthetic construct
  misc_feature 1..318: note = Description of Artificial Sequence: Synthetic polynucleotide
  source 1..318: mol_type = other DNA
tcctatgagctgactcagccaccctcagtgtccgtgtccccaggagagacagccagcatcacctgctctggagatcaattgggggaaaattatgcttgctggtatcagcagaagccaggccagtcccctgtgttggtcatctatcaagatagtaagcggccctcagggatccctgagcgattctctggctccaactctgggaacacagccactctgaccatcagcgggacccaggctctggatgaggctgactattactgtcaggcgtgggacaacagtattgtggtattcggcggagggaccaagctgaccgtccta

SEQ ID NO: 247 - DNA, 327 bp, synthetic construct
  misc_feature 1..327: note = Description of Artificial Sequence: Synthetic polynucleotide
  source 1..327: mol_type = other DNA
cagtctgtgctgactcagccaccctcggtgtcagtggcccccgggcagacggccagtattacctgtgggggagacaacattggaagtaaaagtgtgcactggtaccagcagaagccaggccaggcccctgtgctggtcgtctatgataatagcgaccggccctcagggatccctgagcgattctctggctccaactctgggaccacggccaccctgaccatcagcagggtcgaagccggggatgaggccgactattactgtcaggtgtgggatagtagtagtgatcatcctgtggtattcggcggagggaccaaggtcaccgtccta

SEQ ID NO: 248 - DNA, 1341 bp, synthetic construct
  misc_feature 1..1341: note = Description of Artificial Sequence: Synthetic polynucleotide
  source 1..1341: mol_type = other DNA
gatgtgcagcttcaggagtctggacccggacttgttaaaccaagtcagtctctgtccctgacctgtaccgtcaccggcaacagcatcacaagcgattacgcatggaactggatcaggcagttccctggaaatcgactcgaatggatgggctacatttcatactccggttcaaccacttactctccatccttgaaatctaggttcagcatcacccgtgatacctcaaagaaccaattttttctgcaactgaatagcgtaactccagaggacacagccacatatttctgcgccactgggtattactatggctcaggtttctggggtcagggcactctcgtcaccgtcagcagcgccaaaacaacagcaccaagtgtctatccactggcccctgtgtgtggagatacaactggctcctcggtgactctaggatgcctggtcaagggttatttccctgagccagtgaccttgacctggaactctggatccctgtccagtggtgtgcacaccttcccagctgtcctgcagtctgacctctacaccctcagcagctcagtgactgtaacctcgagcacctggcccagccagtccatcacctgcaatgtggcccacccggcaagcagcaccaaggtggacaagaaaattgagcccagagggcccacaatcaagccctgtcctccatgcaaatgcccagcacctaacctcttgggtggaccatccgtcttcatcttccctccaaagatcaaggatgtactcatgatctccctgagccccatagtcacatgtgtggtggtggatgtgagcgaggatgacccagatgtccagatcagctggtttgtgaacaacgtggaagtacacacagctcagacacaaacccatagagaggattacaacagtactctccgggtggtcagtgccctccccatccagcaccaggactggatgagtggcaaggagttcaaatgcaaggtcaacaacaaagacctcccagcgcccatcgagagaaccatctcaaaacccaaagggtcagtaagagctccacaggtatatgtcttgcctccaccagaagaagagatgactaagaaacaggtcactctgacctgcatggtcaccgacttcatgcctgaagacatttacgtggagtggaccaacaacgggaaaacagagctaaactacaagaacactgaaccagtcctggactctgatggttcttacttcatgtacagcaagctgagagtggaaaagaagaactgggtggaaagaaatagctactcctgttcagtggtccacgagggtctgcacaatcaccacacgactaagagcttctcccggactccgggtaaa

SEQ ID NO: 249 - DNA, 1341 bp, synthetic construct
  misc_feature 1..1341: note = Description of Artificial Sequence: Synthetic polynucleotide
  source 1..1341: mol_type = other DNA
caggtccaactgcaagagagcggaccgggcctggtaaagccatccgacacattgtccctgacgtgtgcggtaagtggaaactctatcactagcgactatgcgtggaattggataagacaaccgccgggcaaggggctggaatggataggatatatcagctattccggttctacgacatacaatccttccctgaaaagcagagtcactatgtcacgcgacacgtccaagaatcagttctcattgaaattgtcatccgtaacggccgttgacactgcggtttattattgcgcaaccggatattactacggctctggtttttggggacagggaacacttgttactgttagttcagcctccaccaagggcccatcggtcttccccctggcaccctcctccaagagcacctctgggggcacagcggccctgggctgcctggtcaaggactacttccccgaaccggtgacggtgtcgtggaactcaggcgccctgaccagcggcgtgcacaccttcccggctgtcctacagtcctcaggactctactccctcagcagcgtggtgaccgtgccctccagcagcttgggcacccagacctacatctgcaacgtgaatcacaagcccagcaacaccaaggtggacaagaaagttgagcccaaatcttgtgacaaaactcacacatgcccaccgtgcccagcacctgaactcctggggggaccgtcagtcttcctcttccccccaaaacccaaggacaccctcatgatctcccggacccctgaggtcacatgcgtggtggtggacgtgagccacgaagaccctgaggtcaagttcaactggtacgtggacggcgtggaggtgcataatgccaagacaaagccgcgggaggagcagtacaacagcacgtaccgtgtggtcagcgtcctcaccgtcctgcaccaggactggctgaatggcaaggagtacaagtgcaaggtctccaacaaagccctcccagcccccatcgagaaaaccatctccaaagccaaagggcagccccgagaaccacaggtgtacaccctgcccccatcccgggaggagatgaccaagaaccaggtcagcctgacctgcctggtcaaaggcttctatcccagcgacatcgccgtggagtgggagagcaatgggcagccggagaacaactacaagaccacgcctcccgtgctggactccgacggctccttcttcctctacagcaagctcaccgtggacaagagcagatggcagcaggggaacgtcttctcatgctccgtgatgcatgaggctctgcacaaccactacacgcagaagagcctctccctgtctccgggtaaa

SEQ ID NO: 250 - DNA, 1356 bp, synthetic construct
  misc_feature 1..1356: note = Description of Artificial Sequence: Synthetic polynucleotide
  source 1..1356: mol_type = other DNA
caggtgcagctgcaggagtcgggcccaggactggtgaagccttcggagaccctgtccctcacctgcactgtctctggtggctccatcagtagttactactggagctggatccggcagcccccagggaagggactggagtggattggatatatctattacagtgggagcaccaactacaacccctccctcaagagtcgagtcaccatatcagtagacacgtccaagaaccagttctccctgaagctgagctctgtgaccgctgcggacacggccgtgtattactgtgcggggactacgatttttggagtggttacccccaacttctactacggtatggacgtctggggccaagggaccacggtcaccgtctcctcagcttccaccaagggcccatccgtcttccccctggcgccctgctccaggagcacctccgagagcacagccgccctgggctgcctggtcaaggactacttccccgaaccggtgacggtgtcgtggaactcaggcgccctgaccagcggcgtgcacaccttcccggctgtcctacagtcctcaggactctactccctcagcagcgtggtgaccgtgccctccagcagcttgggcacgaaaacctacacttgcaacgtagatcacaagcccagcaacaccaaggtggacaagagagttgagtccaaatatggtcccccatgcccaccatgcccagcacctgaggccgccgggggaccatcagtcttcctgttccccccaaaacccaaggacactctcatgatctcccggacccctgaggtcacgtgcgtggtggtggacgtgagccaggaagaccccgaggtccagttcaactggtacgtggatggcgtggaggtgcataatgccaagacaaagccgcgggaggagcagttcaacagcacgtaccgtgtggtcagcgtcctcaccgtcctgcaccaggactggctgaacggcaaggagtacaagtgcaaggtctccaacaaaggcctcccgtcctccatcgagaaaaccatctccaaagccaaagggcagccccgagagccacaggtgtacaccctgcccccatcccaggaggagatgaccaagaaccaggtcagcctgacctgcctggtcaaaggcttctaccccagcgacatcgccgtggagtgggagagcaatgggcagccggagaacaactacaagaccacgcctcccgtgctggactccgacggctccttcttcctctacagcaggctaaccgtggacaagagcagatggcaggaggggaatgtcttctcatgctccgtgatgcatgaggctctgcacaaccactacacacagaagagcctctccctgtctctgggtaaa

SEQ ID NO: 251 - DNA, 1350 bp, synthetic construct
  misc_feature 1..1350: note = Description of Artificial Sequence: Synthetic polynucleotide
  source 1..1350: mol_type = other DNA
gaggtgcagctggtggagtctgggggaggcgtggtccagcctgggaggtccctgagactctcctgtgtagcctctggattcaccttcagtagttatgacatacactgggtccgccaggctccaggcaaggggctggagtgggtggcaattatttcatatgatggaagtaaaaaagactatacagactccgtgaagggccgattcaccatctccagagacaattccaagaacacgctgtatctgcaaatggacagcctgagagttgaggactcggctgtgtattcctgtgcgagagaaagtggctggtcccactactactattacggtatggacgtctggggccaagggacaatggtcaccgtctcttcagcttccaccaagggcccatccgtcttccccctggcgccctgctccaggagcacctccgagagcacagccgccctgggctgcctggtcaaggactacttccccgaaccggtgacggtgtcgtggaactcaggcgccctgaccagcggcgtgcacaccttcccggctgtcctacagtcctcaggactctactccctcagcagcgtggtgaccgtgccctccagcagcttgggcacgaaaacctacacttgcaacgtagatcacaagcccagcaacaccaaggtggacaagagagttgagtccaaatatggtcccccatgcccaccatgcccagcacctgaggccgccgggggaccatcagtcttcctgttccccccaaaacccaaggacactctcatgatctcccggacccctgaggtcacgtgcgtggtggtggacgtgagccaggaagaccccgaggtccagttcaactggtacgtggatggcgtggaggtgcataatgccaagacaaagccgcgggaggagcagttcaacagcacgtaccgtgtggtcagcgtcctcaccgtcctgcaccaggactggctgaacggcaaggagtacaagtgcaaggtctccaacaaaggcctcccgtcctccatcgagaaaaccatctccaaagccaaagggcagccccgagagccacaggtgtacaccctgcccccatcccaggaggagatgaccaagaaccaggtcagcctgacctgcctggtcaaaggcttctaccccagcgacatcgccgtggagtgggagagcaatgggcagccggagaacaactacaagaccacgcctcccgtgctggactccgacggctccttcttcctctacagcaggctaaccgtggacaagagcagatggcaggaggggaatgtcttctcatgctccgtgatgcatgaggctctgcacaaccactacacacagaagagcctctccctgtctctgggtaaa

SEQ ID NO: 252 - DNA, 1338 bp, synthetic construct
  misc_feature 1..1338: note = Description of Artificial Sequence: Synthetic polynucleotide
  source 1..1338: mol_type = other DNA
caggtgcagctgcaggagtcgggcccaggactggtgaagccttcggagaccctgtccctcacctgcactgtctctggtggctccatcagtagttactattggagctggctccggcagcccgccgggtcgggactggagtggattgggcgtttatatgtcagtgggttcaccaactacaacccctccctcaagagtcgagtcaccttgtcactagacccgtccaggaaccagttgtccctgaaactgagttctgtgaccgccgcggacacggccgtatattattgtgcgggagatagtgggaactactggggttggttcgacccctggggccagggaaccctggtcaccgtctcctcagcttccaccaagggcccatccgtcttccccctggcgccctgctccaggagcacctccgagagcacagccgccctgggctgcctggtcaaggactacttccccgaaccggtgacggtgtcgtggaactcaggcgccctgaccagcggcgtgcacaccttcccggctgtcctacagtcctcaggactctactccctcagcagcgtggtgaccgtgccctccagcagcttgggcacgaaaacctacacttgcaacgtagatcacaagcccagcaacaccaaggtggacaagagagttgagtccaaatatggtcccccatgcccaccatgcccagcacctgaggccgccgggggaccatcagtcttcctgttccccccaaaacccaaggacactctcatgatctcccggacccctgaggtcacgtgcgtggtggtggacgtgagccaggaagaccccgaggtccagttcaactggtacgtggatggcgtggaggtgcataatgccaagacaaagccgcgggaggagcagttcaacagcacgtaccgtgtggtcagcgtcctcaccgtcctgcaccaggactggctgaacggcaaggagtacaagtgcaaggtctccaacaaaggcctcccgtcctccatcgagaaaaccatctccaaagccaaagggcagccccgagagccacaggtgtacaccctgcccccatcccaggaggagatgaccaagaaccaggtcagcctgacctgcctggtcaaaggcttctaccccagcgacatcgccgtggagtgggagagcaatgggcagccggagaacaactacaagaccacgcctcccgtgctggactccgacggctccttcttcctctacagcaggctaaccgtggacaagagcagatggcaggaggggaatgtcttctcatgctccgtgatgcatgaggctctgcacaaccactacacacagaagagcctctccctgtctctgggtaaa

SEQ ID NO: 253 - DNA, 1353 bp, synthetic construct
  misc_feature 1..1353: note = Description of Artificial Sequence: Synthetic polynucleotide
  source 1..1353: mol_type = other DNA
caggtgcagctggtggagtctgggggaggcgtggtccagcctgggaggtccctgagactctcctgtgcagcctctggattcaccttcagttactatggcatgcactgggtccgccaggctccaggcaaggggctggagtgggtggcatttatatcatatgatggaagtaataaatactatgcagactccgtgaagggccgattcaccatctccagagacaattccaagaacacgctgtatctgcaaatgaacagcctgagagctgaggacacggctgtgtattactgtgcccacctcccttatagtgggagctactgggcctttgactactggggccagggaacccaggtcaccgtctcttcagcctccaccaagggcccatcggtcttccccctggcaccctcctccaagagcacctctgggggcacagcggccctgggctgcctggtcaaggactacttccccgaaccggtgacggtgtcgtggaactcaggcgccctgaccagcggcgtgcacaccttcccggctgtcctacagtcctcaggactctactccctcagcagcgtggtgaccgtgccctccagcagcttgggcacccagacctacatctgcaacgtgaatcacaagcccagcaacaccaaggtggacaagaaagttgagcccaaatcttgtgacaaaactcacacatgcccaccgtgcccagcacctgaagccgccgggggaccgtcagtcttcctcttccccccaaaacccaaggacaccctcatgatctcccggacccctgaggtcacatgcgtggtggtgagcgtgagccacgaagaccctgaggtcaagttcaactggtacgtggacggcgtggaggtgcataatgccaagacaaagccgcgggaggagcagtacaacagcacgtaccgtgtggtcagcgtcctcaccgtcctgcaccaggactggctgaatggcaaggagtacaagtgcaaggtctccaacaaagccctcccagcccccatcgagaaaaccatctccaaagccaaagggcagccccgagaaccacaggtgtacaccctgcccccatcccgggaggagatgaccaagaaccaggtcagcctgacctgcctggtcaaaggcttctatcccagcgacatcgccgtggagtgggagagcaatgggcagccggagaacaactacaagaccacgcctcccgtgctggactccgacggctccttcttcctctacagcaagctcaccgtggacaagagcagatggcagcaggggaacgtcttctcatgctccgtgatgcatgaggctctgcacaaccactacacgcagaagagcctctccctgtctccgggtaaa

SEQ ID NO: 254 - DNA, 1365 bp, synthetic construct
  misc_feature 1..1365: note = Description of Artificial Sequence: Synthetic polynucleotide
  source 1..1365: mol_type = other DNA
caggtgcagctggtggagtctgggggaggcttggtacagcctggggggtccctgagactctcctgtgcagcctctggattcacctttagtcattatgccatgagctgggtccgccaggctccagggaaggggctggagtgggtctcaactattggtggtagtggtggtagcacatactacgcagactccgtgaagggccggttcaccatctccagagacaattccaagaacacgctgtatctgcaaatgaacagcctgagagccgaggacacggccgtatattactgtgcgaaacctcatattgtaatggtgactgctcttctctacgacggtatggacgtctggggccaagggacaatggtcaccgtctcctcagcctccaccaagggcccatcggtcttccccctggcaccctcctccaagagcacctctgggggcacagcggccctgggctgcctggtcaaggactacttccccgaaccggtgacggtgtcgtggaactcaggcgccctgaccagcggcgtgcacaccttcccggctgtcctacagtcctcaggactctactccctcagcagcgtggtgaccgtgccctccagcagcttgggcacccagacctacatctgcaacgtgaatcacaagcccagcaacaccaaggtggacaagaaagttgagcccaaatcttgtgacaaaactcacacatgcccaccgtgcccagcacctgaagccgccgggggaccgtcagtcttcctcttccccccaaaacccaaggacaccctcatgatctcccggacccctgaggtcacatgcgtggtggtgagcgtgagccacgaagaccctgaggtcaagttcaactggtacgtggacggcgtggaggtgcataatgccaagacaaagccgcgggaggagcagtacaacagcacgtaccgtgtggtcagcgtcctcaccgtcctgcaccaggactggctgaatggcaaggagtacaagtgcaaggtctccaacaaagccctcccagcccccatcgagaaaaccatctccaaagccaaagggcagccccgagaaccacaggtgtacaccctgcccccatcccgggaggagatgaccaagaaccaggtcagcctgacctgcctggtcaaaggcttctatcccagcgacatcgccgtggagtgggagagcaatgggcagccggagaacaactacaagaccacgcctcccgtgctggactccgacggctccttcttcctctacagcaagctcaccgtggacaagagcagatggcagcaggggaacgtcttctcatgctccgtgatgcatgaggctctgcacaaccactacacgcagaagagcctctccctgtctccgggtaaa

SEQ ID NO: 255 - DNA, 654 bp, synthetic construct
  misc_feature 1..654: note = Description of Artificial Sequence: Synthetic polynucleotide
  source 1..654: mol_type = other DNA
gacattgtgctgacacagagtccagcatccttggcagtatctttggggcagcgggcaacaatttcatgccgtgcatctgaaagtgtggagtattttggaacttctcttatgcactggtatcgccagaagcctgggcagcctcccaaactccttatatatgccgcttccaacgtggagtccggagtaccagcacgcttttccggctctgggtccggcacagacttttccctcaatatccaacctgttgaagaagacgatttttccatgtatttttgccaacagacacgcaaggttccatatacattcggcggcggcactaaacttgagatcaaacgggctgatgctgcaccgactgtgtccatcttcccaccatccagtgagcagttaacatctggaggtgcctcagtcgtgtgcttcttgaacaacttctaccccaaagacatcaatgtcaagtggaagattgatggcagtgaacgacaaaatggcgtcctgaacagttggactgatcaggacagcaaagacagcacctacagcatgagcagcaccctcacgttgaccaaggacgagtatgaacgacataacagctatacctgtgaggccactcacaagacatcaacttcacccattgtcaagagcttcaacaggaatgagtgt

SEQ ID NO: 256 - DNA, 654 bp, synthetic construct
  misc_feature 1..654: note = Description of Artificial Sequence: Synthetic polynucleotide
  source 1..654: mol_type = other DNA
gacatagtcttgactcagagcccggattcccttgctgtgtctctgggagaacgagctacgatcaactgcaaggcaagtgaatccgtagaatacttcgggacatcattgatgcattggtatcaacagaaaccggggcaaccgcccaaattgctgatatatgcggctagtaatagagaatcaggagtaccggataggtttagtggttcaggatcaggtacagatttcaccctgacaataagtagcttgcaagccgaagacgtagcagtgtattactgccaacaaacccgaaaggtgccatatacgtttggacagggtacaaagttggaaatcaaacgtacggtggctgcaccatctgtcttcatcttcccgccatctgatgagcagttgaaatctggaactgcctctgttgtgtgcctgctgaataacttctatcccagagaggccaaagtacagtggaaggtggataacgccctccaatcgggtaactcccaggagagtgtcacagagcaggacagcaaggacagcacctacagcctcagcagcaccctgacgctgagcaaagcagactacgagaaacacaaagtctacgcctgcgaagtcacccatcagggcctgagctcgcccgtcacaaagagcttcaacaggggagagtgt

SEQ ID NO: 257 - DNA, 642 bp, synthetic construct
  misc_feature 1..642: note = Description of Artificial Sequence: Synthetic polynucleotide
  source 1..642: mol_type = other DNA
gacatccagatgacccagtctccttccttcctgtctgcatctgtaggagacagagtcaccatcacttgccgggccagtcagggcattagcagttatttagcctggtatcagcaaaaaccagggaaagcccctaagttcctgatctatgctgcatccactttgcaaagtggggtcccatcaaggttcagcggcagtggatctgggacagaattcactctcacaatcagcagcctgcagcctgaagattttgcaacttattactgtcaacagcttaatagttaccctctcactttcggcggagggaccaaggtggaaatcaaacgtacggtggctgcaccatctgtcttcatcttcccgccatctgatgagcagttgaaatctggaactgcctctgttgtgtgcctgctgaataacttctatcccagagaggccaaagtacagtggaaggtggataacgccctccaatcgggtaactcccaggagagtgtcacagagcaggacagcaaggacagcacctacagcctcagcagcaccctgacgctgagcaaagcagactacgagaaacacaaagtctacgcctgcgaagtcacccatcagggcctgagctcgcccgtcacaaagagcttcaacaggggagagtgt

SEQ ID NO: 258 - DNA, 642 bp, synthetic construct
  misc_feature 1..642: note = Description of Artificial Sequence: Synthetic polynucleotide
  source 1..642: mol_type = other DNA
gacatcgtgatgacccagtctccatcctccctgtctgcatctgtaggagacagagtcaccatcacttgccgggcgagtcaggacattagcaattatttagcctggtatcagcagaaaccagggaaagttcctaagttcctgatctatgctgcatccactttgcactctggggtcccatctcggttcagtggcagtggatctgggacagatttcactctcaccatcagcagcctgcagcctgaagatgttgcaacttattactgtcaaaagtataacagtgccccgtacacttttggccaagggacacgactggagattaaacgtacggtggctgcaccatctgtcttcatcttcccgccatctgatgagcagttgaaatctggaactgcctctgttgtgtgcctgctgaataacttctatcccagagaggccaaagtacagtggaaggtggataacgccctccaatcgggtaactcccaggagagtgtcacagagcaggacagcaaggacagcacctacagcctcagcagcaccctgacgctgagcaaagcagactacgagaaacacaaagtctacgcctgcgaagtcacccatcagggcctgagctcgcccgtcacaaagagcttcaacaggggagagtgt

SEQ ID NO: 259 - DNA, 636 bp, synthetic construct
  misc_feature 1..636: note = Description of Artificial Sequence: Synthetic polynucleotide
  source 1..636: mol_type = other DNA
tcctatgagctgactcagccaccctcagtgtccgtgtccccaggagagacagccagcatcacctgctctggagatcaattgggggaaaattatgcttgctggtatcagcagaagccaggccagtcccctgtgttggtcatctatcaagatagtaagcggccctcagggatccctgagcgattctctggctccaactctgggaacacagccactctgaccatcagcgggacccaggctctggatgaggctgactattactgtcaggcgtgggacaacagtattgtggtattcggcggagggaccaagctgaccgtcctaggtcagcccaaggctgcacccagtgtcactctgttcccgccctcctctgaggagcttcaagccaacaaggccacactggtgtgtctcataagtgacttctacccgggagccgtgacagtggcctggaaggccgatagcagccccgtcaaggcgggagtggagaccaccacaccctccaaacaaagcaacaacaagtacgcggccagcagctatctgagcctgacgcctgagcagtggaagtcccacagaagctacagctgccaggtcacgcatgaagggagcaccgtggagaagacagtggcccctacagaatgttca

SEQ ID NO: 260 - DNA, 645 bp, synthetic construct
  misc_feature 1..645: note = Description of Artificial Sequence: Synthetic polynucleotide
  source 1..645: mol_type = other DNA
cagtctgtgctgactcagccaccctcggtgtcagtggcccccgggcagacggccagtattacctgtgggggagacaacattggaagtaaaagtgtgcactggtaccagcagaagccaggccaggcccctgtgctggtcgtctatgataatagcgaccggccctcagggatccctgagcgattctctggctccaactctgggaccacggccaccctgaccatcagcagggtcgaagccggggatgaggccgactattactgtcaggtgtgggatagtagtagtgatcatcctgtggtattcggcggagggaccaaggtcaccgtcctaggtcagcccaaggctgcacccagtgtcactctgttcccgccctcctctgaggagcttcaagccaacaaggccacactggtgtgtctcataagtgacttctacccgggagccgtgacagtggcctggaaggccgatagcagccccgtcaaggcgggagtggagaccaccacaccctccaaacaaagcaacaacaagtacgcggccagcagctatctgagcctgacgcctgagcagtggaagtcccacagaagctacagctgccaggtcacgcatgaagggagcaccgtggagaagacagtggcccctacagaatgttca

SEQ ID NO: 261 - DNA, 642 bp, synthetic construct
  misc_feature 1..642: note = Description of Artificial Sequence: Synthetic polynucleotide
  source 1..642: mol_type = other DNA
tcttctgagctgactcagccaccctcggtgtcagtggccccaggacagacggccaggattacctgtgggggaaacaacattggaagtaaaagtgtgcactggtaccagcagaagccaggccaggcccctgtgctggtcgtctatgatgatagcgaccggccctcagggatccctgagcgattctctggctccaactctgggaacacggccaccctgaccatcagcagggtcgaagccggggatgaggccgactattactgtcaggtgtgggatagtagtagtgatcatgtggtattcggcggagggaccaagctgaccgtcctaggtcagcccaaggctgcacccagtgtcactctgttcccgccctcctctgaggagcttcaagccaacaaggccacactggtgtgtctcataagtgacttctacccgggagccgtgacagtggcctggaaggccgatagcagccccgtcaaggcgggagtggagaccaccacaccctccaaacaaagcaacaacaagtacgcggccagcagctatctgagcctgacgcctgagcagtggaagtcccacagaagctacagctgccaggtcacgcatgaagggagcaccgtggagaagacagtggcccctacagaatgttca

SEQ ID NO: 262 - protein, 248 aa, synthetic construct
  REGION 1..248: note = Description of Artificial Sequence: Synthetic polypeptide
QVQLQESGPGLVKPSDTLSLTCAVSGNSITSDYAWNWIRQFPGKGLEWMGYISYSGSTTYNPSLKSRVTISRDTSKNQFSLKLSSVTPVDTAVYYCATGYYYGSGFWGQGTLVTVSSGGSEGKSSGSGSESKSTGGSDIVLTQSPDSLAVSLGERATINCKASESVEYFGTSLMHWYQQKPGQPPKLLIYAASNRESGVPDRFSGSGSGTDFTLTIQSVQAEDVSVYFCQQTRKVPYTFGQGTKLEIK

SEQ ID NO: 263 - protein, 248 aa, synthetic construct
  REGION 1..248: note = Description of Artificial Sequence: Synthetic polypeptide
QVQLQESGPGLVKPSDTLSLTCAVSGNSITSDYAWNWIRQFPGKGLEWMGYISYSGSTTYNPSLKSRVTISRDTSKNQFSLKLSSVTPVDTAVYYCATGYYYGSGFWGQGTLVTVSSGGSEGKSSGSGSESKSTGGSDIVLTQSPDSLAVSLGERATINCKASESVEYFGTSLMHWYQQKPGQPPKLLIYAASNRESGVPDRFSGSGSGTDFTLTISSLQAEDVAVYYCQQTRKVPYTFGQGTKLEIK

SEQ ID NO: 264 - protein, 248 aa, synthetic construct
  REGION 1..248: note = Description of Artificial Sequence: Synthetic polypeptide
QVQLQESGPGLVKPSDTLSLTCAVSGNSITSDYAWNWIRQFPGKGLEWIGYISYSGSTTYNPSLKSRVTISRDTSKNQFSLKLSSVTPVDTAVYYCATGYYYGSGFWGQGTLVTVSSGGSEGKSSGSGSESKSTGGSDIVLTQSPDSLAVSLGERATINCKASESVEYFGTSLMHWYQQKPGQPPKLLIYAASNRESGVPDRFSGSGSGTDFTLTISSVQAEDVAVYYCQQTRKVPYTFGQGTKLEIK

SEQ ID NO: 265 - protein, 248 aa, synthetic construct
  REGION 1..248: note = Description of Artificial Sequence: Synthetic polypeptide
QVQLQESGPGLVKPSDTLSLTCAVSGNSITSDYAWNWIRQFPGKGLEWMGYISYSGSTTYNPSLKSRVTISRDTSKNQFSLKLSSVTPVDTAVYYCATGYYYGSGFWGQGTLVTVSSGGSEGKSSGSGSESKSTGGSDIVLTQSPDSLAVSLGERATINCKASESVEYFGTSLMHWYQQKPGQPPKLLIYAASNRESGVPDRFSGSGSGTDFTLTISSVQAEDVAVYYCQQTRKVPYTFGQGTKLEIK

SEQ ID NO: 266 - protein, 248 aa, synthetic construct
  REGION 1..248: note = Description of Artificial Sequence: Synthetic polypeptide
DIVLTQSPDSLAVSLGERATINCKASESVEYFGTSLMHWYQQKPGQPPKLLIYAASNRESGVPDRFSGSGSGTDFTLTIQSVQAEDVSVYFCQQTRKVPYTFGQGTKLEIKGGSEGKSSGSGSESKSTGGSQVQLQESGPGLVKPSDTLSLTCAVSGNSITSDYAWNWIRQFPGKGLEWMGYISYSGSTTYNPSLKSRVTISRDTSKNQFSLKLSSVTPVDTAVYYCATGYYYGSGFWGQGTLVTVSS

SEQ ID NO: 267 - protein, 248 aa, synthetic construct
  REGION 1..248: note = Description of Artificial Sequence: Synthetic polypeptide
DIVLTQSPDSLAVSLGERATINCKASESVEYFGTSLMHWYQQKPGQPPKLLIYAASNRESGVPDRFSGSGSGTDFTLTISSLQAEDVAVYYCQQTRKVPYTFGQGTKLEIKGGSEGKSSGSGSESKSTGGSQVQLQESGPGLVKPSDTLSLTCAVSGNSITSDYAWNWIRQFPGKGLEWIGYISYSGSTTYNPSLKSRVTISRDTSKNQFSLKLSSVTPVDTAVYYCATGYYYGSGFWGQGTLVTVSS

SEQ ID NO: 268 - protein, 248 aa, synthetic construct
  REGION 1..248: note = Description of Artificial Sequence: Synthetic polypeptide
DIVLTQSPDSLAVSLGERATINCKASESVEYFGTSLMHWYQQKPGQPPKLLIYAASNRESGVPDRFSGSGSGTDFTLTISSLQAEDVAVYYCQQTRKVPYTFGQGTKLEIKGGSEGKSSGSGSESKSTGGSQVQLQESGPGLVKPSDTLSLTCAVSGNSITSDYAWNWIRQFPGKGLEWMGYISYSGSTTYNPSLKSRVTISRDTSKNQFSLKLSSVTPVDTAVYYCATGYYYGSGFWGQGTLVTVSS

SEQ ID NO: 269 - protein, 248 aa, synthetic construct
  REGION 1..248: note = Description of Artificial Sequence: Synthetic polypeptide
DIVLTQSPDSLAVSLGERATINCKASESVEYFGTSLMHWYQQKPGQPPKLLIYAASNRESGVPDRFSGSGSGTDFTLTISSVQAEDVAVYYCQQTRKVPYTFGQGTKLEIKGGSEGKSSGSGSESKSTGGSQVQLQESGPGLVKPSDTLSLTCAVSGNSITSDYAWNWIRQFPGKGLEWIGYISYSGSTTYNPSLKSRVTISRDTSKNQFSLKLSSVTPVDTAVYYCATGYYYGSGFWGQGTLVTVSS

SEQ ID NO: 270 - protein, 248 aa, synthetic construct
  REGION 1..248: note = Description of Artificial Sequence: Synthetic polypeptide
DIVLTQSPDSLAVSLGERATINCKASESVEYFGTSLMHWYQQKPGQPPKLLIYAASNRESGVPDRFSGSGSGTDFTLTISSVQAEDVAVYYCQQTRKVPYTFGQGTKLEIKGGSEGKSSGSGSESKSTGGSQVQLQESGPGLVKPSDTLSLTCAVSGNSITSDYAWNWIRQFPGKGLEWMGYISYSGSTTYNPSLKSRVTISRDTSKNQFSLKLSSVTPVDTAVYYCATGYYYGSGFWGQGTLVTVSS

SEQ ID NO: 271 - protein, 248 aa, synthetic construct
  REGION 1..248: note = Description of Artificial Sequence: Synthetic polypeptide
DIVLTQSPDSLAVSLGERATINCKASESVEYFGTSLMHWYQQKPGQPPKLLIYAASNRESGVPDRFSGSGSGTDFTLTIQSVQAEDVSVYFCQQTRKVPYTFGQGTKLEIKGGSEGKSSGSGSESKSTGGSQVQLQESGPGLVKPSDTLSLTCAVSGNSITSDYAWNWIRQFPGKGLEWIGYISYSGSTTYNPSLKSRVTISRDTSKNQFSLKLSSVTPVDTAVYYCATGYYYGSGFWGQGTLVTVSS

SEQ ID NO: 272 - protein, 248 aa, synthetic construct
  REGION 1..248: note = Description of Artificial Sequence: Synthetic polypeptide
QVQLQESGPGLVKPSDTLSLTCAVSGNSITSDYAWNWIRQPPGKGLEWIGYISYSGSTTYNPSLKSRVTMSRDTSKNQFSLKLSSVTAVDTAVYYCATGYYYGSGFWGQGTLVTVSSGGSEGKSSGSGSESKSTGGSDIVLTQSPDSLAVSLGERATINCKASESVEYFGTSLMHWYQQKPGQPPKLLIYAASNRESGVPDRFSGSGSGTDFTLTISSVQAEDVAVYYCQQTRKVPYTFGQGTKLEIK

SEQ ID NO: 273 - protein, 248 aa, synthetic construct
  REGION 1..248: note = Description of Artificial Sequence: Synthetic polypeptide
QVQLQESGPGLVKPSDTLSLTCAVSGNSITSDYAWNWIRQPPGKGLEWIGYISYSGSTTYNPSLKSRVTMSRDTSKNQFSLKLSSVTAVDTAVYYCATGYYYGSGFWGQGTLVTVSSGGSEGKSSGSGSESKSTGGSDIVLTQSPDSLAVSLGERATINCKASESVEYFGTSLMHWYQQKPGQPPKLLIYAASNRESGVPDRFSGSGSGTDFTLTIQSVQAEDVSVYFCQQTRKVPYTFGQGTKLEIK

SEQ ID NO: 274 - protein, 248 aa, synthetic construct
  REGION 1..248: note = Description of Artificial Sequence: Synthetic polypeptide
QVQLQESGPGLVKPSDTLSLTCAVSGNSITSDYAWNWIRQPPGKGLEWIGYISYSGSTTYNPSLKSRVTMSRDTSKNQFSLKLSSVTAVDTAVYYCATGYYYGSGFWGQGTLVTVSSGGSEGKSSGSGSESKSTGGSDIVLTQSPDSLAVSLGERATINCKASESVEYFGTSLMHWYQQKPGQPPKLLIYAASNRESGVPDRFSGSGSGTDFTLTISSLQAEDVAVYYCQQTRKVPYTFGQGTKLEIK

SEQ ID NO: 275 - protein, 248 aa, synthetic construct
  REGION 1..248: note = Description of Artificial Sequence: Synthetic polypeptide
DIVLTQSPDSLAVSLGERATINCKASESVEYFGTSLMHWYQQKPGQPPKLLIYAASNRESGVPDRFSGSGSGTDFTLTIQSVQAEDVSVYFCQQTRKVPYTFGQGTKLEIKGGSEGKSSGSGSESKSTGGSQVQLQESGPGLVKPSDTLSLTCAVSGNSITSDYAWNWIRQPPGKGLEWIGYISYSGSTTYNPSLKSRVTMSRDTSKNQFSLKLSSVTAVDTAVYYCATGYYYGSGFWGQGTLVTVSS

SEQ ID NO: 276 - protein, 248 aa, synthetic construct
  REGION 1..248: note = Description of Artificial Sequence: Synthetic polypeptide
DIVLTQSPDSLAVSLGERATINCKASESVEYFGTSLMHWYQQKPGQPPKLLIYAASNRESGVPDRFSGSGSGTDFTLTISSLQAEDVAVYYCQQTRKVPYTFGQGTKLEIKGGSEGKSSGSGSESKSTGGSQVQLQESGPGLVKPSDTLSLTCAVSGNSITSDYAWNWIRQPPGKGLEWIGYISYSGSTTYNPSLKSRVTMSRDTSKNQFSLKLSSVTAVDTAVYYCATGYYYGSGFWGQGTLVTVSS

SEQ ID NO: 277 - protein, 248 aa, synthetic construct
  REGION 1..248: note = Description of Artificial Sequence: Synthetic polypeptide
DIVLTQSPDSLAVSLGERATINCKASESVEYFGTSLMHWYQQKPGQPPKLLIYAASNRESGVPDRFSGSGSGTDFTLTISSVQAEDVAVYYCQQTRKVPYTFGQGTKLEIKGGSEGKSSGSGSESKSTGGSQVQLQESGPGLVKPSDTLSLTCAVSGNSITSDYAWNWIRQPPGKGLEWIGYISYSGSTTYNPSLKSRVTMSRDTSKNQFSLKLSSVTAVDTAVYYCATGYYYGSGFWGQGTLVTVSS

SEQ ID NO: 278 - protein, 251 aa, synthetic construct
  REGION 1..251: note = Description of Artificial Sequence: Synthetic polypeptide
EVQLVESGGGLVQPGGSLRLSCAASGFTFSSYWMTWVRQAPGKGLEWVANIKQDGSERYYVDSVKGRFTISRDNAKNSLYLQMNSLRAEDTAVYYCARDQNYDILTGHYGMDVWGQGTTVTVSSGGSEGKSSGSGSESKSTGGSEIVLTQSPSFLSASVGDRVTITCRASQGISSYLSWYQQKPGKAPKLLIYATSTLQSGVPSRFSGSGSGTEFTLTISSLQPEDFATYYCQQLNSYPRTFGQGTKVEIK

SEQ ID NO: 279 - protein, 251 aa, synthetic construct
  REGION 1..251: note = Description of Artificial Sequence: Synthetic polypeptide
EIVLTQSPSFLSASVGDRVTITCRASQGISSYLSWYQQKPGKAPKLLIYATSTLQSGVPSRFSGSGSGTEFTLTISSLQPEDFATYYCQQLNSYPRTFGQGTKVEIKGGSEGKSSGSGSESKSTGGSEVQLVESGGGLVQPGGSLRLSCAASGFTFSSYWMTWVRQAPGKGLEWVANIKQDGSERYYVDSVKGRFTISRDNAKNSLYLQMNSLRAEDTAVYYCARDQNYDILTGHYGMDVWGQGTTVTVSS

SEQ ID NO: 280 - protein, 248 aa, synthetic construct
  REGION 1..248: note = Description of Artificial Sequence: Synthetic polypeptide
QVQLQESGPGLVKPSQTLSLTCTVSGNSITSDYAWNWIRQFPGKRLEWIGYISYSGSTTYNPSLKSRVTISRDTSKNQFSLKLSSVTAADTAVYYCATGYYYGSGFWGQGTLVTVSSGGSEGKSSGSGSESKSTGGSEIVLTQSPATLSLSPGERATLSCRASESVEYFGTSLMHWYQQKPGQPPRLLIYAASNVESGIPARFSGSGSGTDFTLTISSVEPEDFAVYFCQQTRKVPYTFGGGTKVEIK

SEQ ID NO: 281 - protein, 248 aa, synthetic construct
  REGION 1..248: note = Description of Artificial Sequence: Synthetic polypeptide
EIVLTQSPATLSLSPGERATLSCRASESVEYFGTSLMHWYQQKPGQPPRLLIYAASNVESGIPARFSGSGSGTDFTLTISSVEPEDFAVYFCQQTRKVPYTFGGGTKVEIKGGSEGKSSGSGSESKSTGGSQVQLQESGPGLVKPSQTLSLTCTVSGNSITSDYAWNWIRQFPGKRLEWIGYISYSGSTTYNPSLKSRVTISRDTSKNQFSLKLSSVTAADTAVYYCATGYYYGSGFWGQGTLVTVSS

SEQ ID NO: 282 - protein, 248 aa, synthetic construct
  REGION 1..248: note = Description of Artificial Sequence: Synthetic polypeptide
QVQLQESGPGLVKPSQTLSLTCTVSGNSITSDYAWNWIRQFPGKGLEWIGYISYSGSTTYNPSLKSRVTISRDTSKNQFSLKLSSVTAADTAVYYCATGYYYGSGFWGQGTLVTVSSGGSEGKSSGSGSESKSTGGSDIVLTQSPDSLAVSLGERATINCRASESVEYFGTSLMHWYQQKPGQPPKLLIYAASNVESGVPDRFSGSGSGTDFTLTISSLQAEDVAVYFCQQTRKVPYTFGGGTKVEIK

SEQ ID NO: 283 - protein, 248 aa, synthetic construct
  REGION 1..248: note = Description of Artificial Sequence: Synthetic polypeptide
DIVLTQSPDSLAVSLGERATINCRASESVEYFGTSLMHWYQQKPGQPPKLLIYAASNVESGVPDRFSGSGSGTDFTLTISSLQAEDVAVYFCQQTRKVPYTFGGGTKVEIKGGSEGKSSGSGSESKSTGGSQVQLQESGPGLVKPSQTLSLTCTVSGNSITSDYAWNWIRQFPGKGLEWIGYISYSGSTTYNPSLKSRVTISRDTSKNQFSLKLSSVTAADTAVYYCATGYYYGSGFWGQGTLVTVSS

SEQ ID NO: 284 - protein, 248 aa, synthetic construct
  REGION 1..248: note = Description of Artificial Sequence: Synthetic polypeptide
QVQLQESGPGLVKPSQTLSLTCTVSGNSITSDYAWNWIRQPPGKGLEWIGYISYSGSTTYNPSLKSRVTISRDTSKNQFSLKLSSVTAADTAVYYCATGYYYGSGFWGQGTLVTVSSGGSEGKSSGSGSESKSTGGSEIVLTQSPATLSLSPGERATLSCRASESVEYFGTSLMHWYQQKPGQPPRLLIYAASNVESGIPARFSGSGSGTDFTLTISSVEPEDFAVYFCQQTRKVPYTFGGGTKVEIK

SEQ ID NO: 285 - protein, 248 aa, synthetic construct
  REGION 1..248: note = Description of Artificial Sequence: Synthetic polypeptide
EIVLTQSPATLSLSPGERATLSCRASESVEYFGTSLMHWYQQKPGQPPRLLIYAASNVESGIPARFSGSGSGTDFTLTISSVEPEDFAVYFCQQTRKVPYTFGGGTKVEIKGGSEGKSSGSGSESKSTGGSQVQLQESGPGLVKPSQTLSLTCTVSGNSITSDYAWNWIRQPPGKGLEWIGYISYSGSTTYNPSLKSRVTISRDTSKNQFSLKLSSVTAADTAVYYCATGYYYGSGFWGQGTLVTVSS

SEQ ID NO: 286 - protein, 248 aa, synthetic construct
  REGION 1..248: note = Description of Artificial Sequence: Synthetic polypeptide
QVQLQESGPGLVKPSQTLSLTCTVSGNSITSDYAWNWIRQFPGKGLEWIGYISYSGSTTYNPSLKSRVTISRDTSKNQFSLKLSSVTAADTAVYYCATGYYYGSGFWGQGTLVTVSSGGSEGKSSGSGSESKSTGGSEIVLTQSPATLSLSPGERATLSCRASESVEYFGTSLMHWYQQKPGQPPRLLIYAASNVESGIPARFSGSGSGTDFTLTISSVEPEDFAVYFCQQTRKVPYTFGGGTKVEIK

SEQ ID NO: 287 - protein, 248 aa, synthetic construct
  REGION 1..248: note = Description of Artificial Sequence: Synthetic polypeptide
EIVLTQSPATLSLSPGERATLSCRASESVEYFGTSLMHWYQQKPGQPPRLLIYAASNVESGIPARFSGSGSGTDFTLTISSVEPEDFAVYFCQQTRKVPYTFGGGTKVEIKGGSEGKSSGSGSESKSTGGSQVQLQESGPGLVKPSQTLSLTCTVSGNSITSDYAWNWIRQFPGKGLEWIGYISYSGSTTYNPSLKSRVTISRDTSKNQFSLKLSSVTAADTAVYYCATGYYYGSGFWGQGTLVTVSS

SEQ ID NO: 288 - protein, 249 aa, synthetic construct
  REGION 1..249: note = Description of Artificial Sequence: Synthetic polypeptide
QVQLVESGGGVVQPGRSLRLSCAASGFTFSYYGMHWVRQAPGKGLEWVAFISYDGSNKYYADSVKGRFTISRDNSKNTLYLQMNSLRAEDTAVYYCAHLPYSGSYWAFDYWGQGTQVTVSSGGSEGKSSGSGSESKSTGGSQSVLTQPPSVSVAPGQTASITCGGDNIGSKSVHWYQQKPGQAPVLVVYDNSDRPSGIPERFSGSNSGTTATLTISRVEAGDEADYYCQVWDSSSDHPVVFGGGTKVTV

SEQ ID NO: 289 - protein, 249 aa, synthetic construct
  REGION 1..249: note = Description of Artificial Sequence: Synthetic polypeptide
QSVLTQPPSVSVAPGQTASITCGGDNIGSKSVHWYQQKPGQAPVLVVYDNSDRPSGIPERFSGSNSGTTATLTISRVEAGDEADYYCQVWDSSSDHPVVFGGGTKVTVGGSEGKSSGSGSESKSTGGSQVQLVESGGGVVQPGRSLRLSCAASGFTFSYYGMHWVRQAPGKGLEWVAFISYDGSNKYYADSVKGRFTISRDNSKNTLYLQMNSLRAEDTAVYYCAHLPYSGSYWAFDYWGQGTQVTVSS

SEQ ID NO: 290 - protein, 253 aa, synthetic construct
  REGION 1..253: note = Description of Artificial Sequence: Synthetic polypeptide
QVQLVESGGGLVQPGGSLRLSCAASGFTFSHYAMSWVRQAPGKGLEWVSTIGGSGGSTYYADSVKGRFTISRDNSKNTLYLQMNSLRAEDTAVYYCAKPHIVMVTALLYDGMDVWGQGTMVTVSSGGSEGKSSGSGSESKSTGGSSSELTQPPSVSVAPGQTARITCGGNNIGSKSVHWYQQKPGQAPVLVVYDDSDRPSGIPERFSGSNSGNTATLTISRVEAGDEADYYCQVWDSSSDHVVFGGGTKLTVL

SEQ ID NO: 291 - protein, 253 aa, synthetic construct
  REGION 1..253: note = Description of Artificial Sequence: Synthetic polypeptide
SSELTQPPSVSVAPGQTARITCGGNNIGSKSVHWYQQKPGQAPVLVVYDDSDRPSGIPERFSGSNSGNTATLTISRVEAGDEADYYCQVWDSSSDHVVFGGGTKLTVLGGSEGKSSGSGSESKSTGGSQVQLVESGGGLVQPGGSLRLSCAASGFTFSHYAMSWVRQAPGKGLEWVSTIGGSGGSTYYADSVKGRFTISRDNSKNTLYLQMNSLRAEDTAVYYCAKPHIVMVTALLYDGMDVWGQGTMVTVSS

SEQ ID NO: 292 - protein, 9 aa, synthetic construct
  REGION 1..9: note = Description of Artificial Sequence: Synthetic peptide
GWGSIEPEE

SEQ ID NO: 293 - protein, 231 aa, synthetic construct
  REGION 1..231: note = Description of Artificial Sequence: Synthetic polypeptide
EPKSSDKTHTCPPCPAPEAAGGPSVFLFPPKPKDTLMISRTPEVTCVVVSVSHEDPEVKFNWYVDGVEVHNAKTKPREEQYNSTYRVVSVLTVLHQDWLNGKEYKCKVSNKALPAPIEKTISKAKGQPREPQVYVYPPSREEMTKNQVSLTCLVKGFYPSDIAVEWESNGQPENNYKTTPPVLDSDGSFALVSKLTVDKSRWQQGNVFSCSVMHEALHNHYTQKSLSLSPG

SEQ ID NO: 294 - DNA, 729 bp, synthetic construct
  misc_feature 1..729: note = Description of Artificial Sequence: Synthetic polynucleotide
  source 1..729: mol_type = other DNA
gaggtgcagctggtggagagcggtggcggtctggtgaagccaggtggcagcctgcgcctgagctgtgccgccagcggtttcaccttcagccgctacaacatgaactgggtgcgccaagccccaggcaagggcctggagtgggtgagcagcatcagcaccagcagcaactacatctactacgccgacagcgtgaagggccgcttcaccttcagccgcgacaacgccaagaacagcctggacctgcagatgagcggtctgcgcgccgaggacaccgccatctactactgcacccgcggttggggcccattcgactactggggccagggcaccctggtgaccgtgagcagcggcggatctgagggaaagtccagcggctccggcagcgaaagcaagtccaccggcggaagcgacatccagatgacccagagcccaagcagcctgagcgccagcgtcggcgaccgcgtgaccatcacctgtcgtgcccgccagagcatcggcaccgccatccactggtaccagcagaagccaggcaaggccccaaagctgctgatctactacgccagcgagagcatcagcggtgtgccaagccgcttcagcggcagcggcagcggcaccgacttcaccctgaccatcagcagcgtgcagccagaggacttcgccacctactactgccagcagagcggcagctggccatacaccttcggccagggcaccaagctggagatcaag

SEQ ID NO: 295 - DNA, 729 bp, synthetic construct
  misc_feature 1..729: note = Description of Artificial Sequence: Synthetic polynucleotide
  source 1..729: mol_type = other DNA
gacatccagatgacccagagcccaagcagcctgagcgccagcgtcggcgaccgcgtgaccatcacctgtcgtgcccgccagagcatcggcaccgccatccactggtaccagcagaagccaggcaaggccccaaagctgctgatctactacgccagcgagagcatcagcggtgtgccaagccgcttcagcggcagcggcagcggcaccgacttcaccctgaccatcagcagcgtgcagccagaggacttcgccacctactactgccagcagagcggcagctggccatacaccttcggccagggcaccaagctggagatcaagggcggatctgagggaaagtccagcggctccggcagcgaaagcaagtccaccggcggaagcgaggtgcagctggtggagagcggtggcggtctggtgaagccaggtggcagcctgcgcctgagctgtgccgccagcggtttcaccttcagccgctacaacatgaactgggtgcgccaagccccaggcaagggcctggagtgggtgagcagcatcagcaccagcagcaactacatctactacgccgacagcgtgaagggccgcttcaccttcagccgcgacaacgccaagaacagcctggacctgcagatgagcggtctgcgcgccgaggacaccgccatctactactgcacccgcggttggggcccattcgactactggggccagggcaccctggtgaccgtgagcagc

SEQ ID NO: 296 - DNA, 729 bp, synthetic construct
  misc_feature 1..729: note = Description of Artificial Sequence: Synthetic polynucleotide
  source 1..729: mol_type = other DNA
gaggtgcagctggtggagagcggtggcggtctggtgaagccaggtggcagcctgcgcctgagctgtgccgccagcggtttcaccttcagccgctacaacatgaactgggtgcgccaagccccaggcaagggcctggagtgggtgagcagcatcagcaccagcagcaactacatctactacgccgacagcgtgaagggccgcttcaccttcagccgcgacaacgccaagaacagcctggacctgcagatgagcggtctgcgcgccgaggacaccgccatctactactgcacccgcggttggggcccattcgactactggggccagggcaccctggtgaccgtgagcagcggcggatctgagggaaagtccagcggctccggcagcgaaagcaagtccaccggcggaagcgacatccagatgacccagagcccaagcagcctgagcgccagcgtcggcgaccgcgtgaccatcacctgtcgtgcccgccagagcatcggcaccgccatccactggtaccagcagaagccaggcaaggccccaaagctgctgatcaagtacgccagcgagagcatcagcggtgtgccaagccgcttcagcggcagcggcagcggcaccgacttcaccctgaccatcagcagcctgcagccagaggacttcgccacctactactgccagcagagcggcagctggccatacaccttcggccagggcaccaagctggagatcaag

SEQ ID NO: 297 - DNA, 729 bp, synthetic construct
  misc_feature 1..729: note = Description of Artificial Sequence: Synthetic polynucleotide
  source 1..729: mol_type = other DNA
gacatccagatgacccagagcccaagcagcctgagcgccagcgtcggcgaccgcgtgaccatcacctgtcgtgcccgccagagcatcggcaccgccatccactggtaccagcagaagccaggcaaggccccaaagctgctgatcaagtacgccagcgagagcatcagcggtgtgccaagccgcttcagcggcagcggcagcggcaccgacttcaccctgaccatcagcagcctgcagccagaggacttcgccacctactactgccagcagagcggcagctggccatacaccttcggccagggcaccaagctggagatcaagggcggatctgagggaaagtccagcggctccggcagcgaaagcaagtccaccggcggaagcgaggtgcagctggtggagagcggtggcggtctggtgaagccaggtggcagcctgcgcctgagctgtgccgccagcggtttcaccttcagccgctacaacatgaactgggtgcgccaagccccaggcaagggcctggagtgggtgagcagcatcagcaccagcagcaactacatctactacgccgacagcgtgaagggccgcttcaccttcagccgcgacaacgccaagaacagcctggacctgcagatgagcggtctgcgcgccgaggacaccgccatctactactgcacccgcggttggggcccattcgactactggggccagggcaccctggtgaccgtgagcagc

SEQ ID NO: 298 - DNA, 729 bp, synthetic construct
  misc_feature 1..729: note = Description of Artificial Sequence: Synthetic polynucleotide
  source 1..729: mol_type = other DNA
gaggtgcagctggtggagagcggtggcggtctggtgaagccaggtggcagcctgcgcctgagctgtgccgccagcggtttcaccttcagccgctacaacatgaactgggtgcgccaagccccaggcaagggcctggagtgggtgagcagcatcagcaccagcagcaactacatctactacgccgacagcgtgaagggccgcttcaccttcagccgcgacaacgccaagaacagcctggacctgcagatgagcggtctgcgcgccgaggacaccgccatctactactgcacccgcggttggggcccattcgactactggggccagggcaccctggtgaccgtgagcagcggcggatctgagggaaagtccagcggctccggcagcgaaagcaagtccaccggcggaagcgacatccagatgacccagagcccaagcagcctgagcgccagcgtcggcgaccgcgtgaccatcacctgtcgtgcccgccagagcatcggcaccgccatccactggtaccagcagaagccaggcaaggccccaaagctgctgatcaagtacgccagcgagagcatcagcggtgtgccaagccgcttcagcggcagcggcagcggcaccgacttcaccctgaccatcagcagcgtgcagccagaggacttcgccacctactactgccagcagagcggcagctggccatacaccttcggccagggcaccaagctggagatcaag

SEQ ID NO: 299 - DNA, 729 bp, synthetic construct
  misc_feature 1..729: note = Description of Artificial Sequence: Synthetic polynucleotide
  source 1..729: mol_type = other DNA
gacatccagatgacccagagcccaagcagcctgagcgccagcgtcggcgaccgcgtgaccatcacctgtcgtgcccgccagagcatcggcaccgccatccactggtaccagcagaagccaggcaaggccccaaagctgctgatcaagtacgccagcgagagcatcagcggtgtgccaagccgcttcagcggcagcggcagcggcaccgacttcaccctgaccatcagcagcgtgcagccagaggacttcgccacctactactgccagcagagcggcagctggccatacaccttcggccagggcaccaagctggagatcaagggcggatctgagggaaagtccagcggctccggcagcgaaagcaagtccaccggcggaagcgaggtgcagctggtggagagcggtggcggtctggtgaagccaggtggcagcctgcgcctgagctgtgccgccagcggtttcaccttcagccgctacaacatgaactgggtgcgccaagccccaggcaagggcctggagtgggtgagcagcatcagcaccagcagcaactacatctactacgccgacagcgtgaagggccgcttcaccttcagccgcgacaacgccaagaacagcctggacctgcagatgagcggtctgcgcgccgaggacaccgccatctactactgcacccgcggttggggcccattcgactactggggccagggcaccctggtgaccgtgagcagc

SEQ ID NO: 300 - DNA, 729 bp, synthetic construct
  misc_feature 1..729: note = Description of Artificial Sequence: Synthetic polynucleotide
  source 1..729: mol_type = other DNA
gaggtgcagctggtggagagcggtggcggtctggtgaagccaggtggcagcctgcgcctgagctgtgccgccagcggtttcaccttcagccgctacaacatgaactgggtgcgccaagccccaggcaagggcctggagtgggtgagcagcatcagcaccagcagcaactacatctactacgccgacagcgtgaagggccgcttcaccttcagccgcgacaacgccaagaacagcctggacctgcagatgagcggtctgcgcgccgaggacaccgccatctactactgcacccgcggttggggcccattcgactactggggccagggcaccctggtgaccgtgagcagcggcggatctgagggaaagtccagcggctccggcagcgaaagcaagtccaccggcggaagcgacatccagatgacccagagcccaagcagcctgagcgccagcgtcggcgaccgcgtgaccatcacctgtcgtgcccgccagagcatcggcaccgccatccactggtaccagcagaagccaggcaaggccccaaagctgctgatctactacgccagcgagagcatcagcggtgtgccaagccgcttcagcggcagcggcagcggcaccgacttcaccctgaccatcagcagcctgcagccagaggacttcgccacctactactgccagcagagcggcagctggccatacaccttcggccagggcaccaagctggagatcaag

SEQ ID NO: 301 - DNA, 729 bp, synthetic construct
  misc_feature 1..729: note = Description of Artificial Sequence: Synthetic polynucleotide
  source 1..729: mol_type = other DNA
gacatccagatgacccagagcccaagcagcctgagcgccagcgtcggcgaccgcgtgaccatcacctgtcgtgcccgccagagcatcggcaccgccatccactggtaccagcagaagccaggcaaggccccaaagctgctgatctactacgccagcgagagcatcagcggtgtgccaagccgcttcagcggcagcggcagcggcaccgacttcaccctgaccatcagcagcctgcagccagaggacttcgccacctactactgccagcagagcggcagctggccatacaccttcggccagggcaccaagctggagatcaagggcggatctgagggaaagtccagcggctccggcagcgaaagcaagtccaccggcggaagcgaggtgcagctggtggagagcggtggcggtctggtgaagccaggtggcagcctgcgcctgagctgtgccgccagcggtttcaccttcagccgctacaacatgaactgggtgcgccaagccccaggcaagggcctggagtgggtgagcagcatcagcaccagcagcaactacatctactacgccgacagcgtgaagggccgcttcaccttcagccgcgacaacgccaagaacagcctggacctgcagatgagcggtctgcgcgccgaggacaccgccatctactactgcacccgcggttggggcccattcgactactggggccagggcaccctggtgaccgtgagcagc

SEQ ID NO: 302 - DNA, 729 bp, synthetic construct
  misc_feature 1..729: note = Description of Artificial Sequence: Synthetic polynucleotide
  source 1..729: mol_type = other DNA
gaggtgcaactggtggagtctgggggaggcctggtcaagcctggggggtccctgagactctcctgtgcagcctctggattcaccttcagtagatataacatgaactgggtccgccaggctccagggaaggggctggagtgggtctcatccattagtactagtagtaattacatatactacgcagactcagtgaagggccgattcaccttctccagagacaacgccaagaactcactggatctgcaaatgagcggcctgagagccgaggacacggctatttattactgtacgagaggctgggggccttttgactactggggccagggaaccctggtcaccgtctcctcaggcggatctgagggaaagtccagcggctccggcagcgaaagcaagtccaccggcggaagcgacatcttgctgactcagtctccaggcatcctgtctgtgagtccaggagaaagagtcagtttctcctgcagggccagacagagcattggcacagccatacactggtatcagcaaagaacaaatggttctccaaggcttctcataaagtatgcttctgagtctatctctgggatcccttccaggtttagcggcagtggatcagggacagattttactcttaccatcaacagtgtggagtctgaagatattgcagattattactgtcaacaaagtgggagctggccgtacacgttcggaggggggaccaagctggaaataaaa

SEQ ID NO: 303 - DNA, 729 bp, synthetic construct
  misc_feature 1..729: note = Description of Artificial Sequence: Synthetic polynucleotide
  source 1..729: mol_type = other DNA
gacatcttgctgactcagtctccaggcatcctgtctgtgagtccaggagaaagagtcagtttctcctgcagggccagacagagcattggcacagccatacactggtatcagcaaagaacaaatggttctccaaggcttctcataaagtatgcttctgagtctatctctgggatcccttccaggtttagcggcagtggatcagggacagattttactcttaccatcaacagtgtggagtctgaagatattgcagattattactgtcaacaaagtgggagctggccgtacacgttcggaggggggaccaagctggaaataaaaggcggatctgagggaaagtccagcggctccggcagcgaaagcaagtccaccggcggaagcgaggtgcaactggtggagtctgggggaggcctggtcaagcctggggggtccctgagactctcctgtgcagcctctggattcaccttcagtagatataacatgaactgggtccgccaggctccagggaaggggctggagtgggtctcatccattagtactagtagtaattacatatactacgcagactcagtgaagggccgattcaccttctccagagacaacgccaagaactcactggatctgcaaatgagcggcctgagagccgaggacacggctatttattactgtacgagaggctgggggccttttgactactggggccagggaaccctggtcaccgtctcctca

SEQ ID NO: 304 - DNA, 1425 bp, synthetic construct
  misc_feature 1..1425: note = Description of Artificial Sequence: Synthetic polynucleotide
  source 1..1425: mol_type = other DNA
gaggtgcagctggtggagagcggtggcggtctggtgaagccaggtggcagcctgcgcctgagctgtgccgccagcggtttcaccttcagccgctacaacatgaactgggtgcgccaagccccaggcaagggcctggagtgggtgagcagcatcagcaccagcagcaactacatctactacgccgacagcgtgaagggccgcttcaccttcagccgcgacaacgccaagaacagcctggacctgcagatgagcggtctgcgcgccgaggacaccgccatctactactgcacccgcggttggggcccattcgactactggggccagggcaccctggtgaccgtgagcagcggcggatctgagggaaagtccagcggctccggcagcgaaagcaagtccaccggcggaagcgacatccagatgacccagagcccaagcagcctgagcgccagcgtcggcgaccgcgtgaccatcacctgtcgtgcccgccagagcatcggcaccgccatccactggtaccagcagaagccaggcaaggccccaaagctgctgatctactacgccagcgagagcatcagcggtgtgccaagccgcttcagcggcagcggcagcggcaccgacttcaccctgaccatcagcagcgtgcagccagaggacttcgccacctactactgccagcagagcggcagctggccatacaccttcggccagggcaccaagctggagatcaaggagcccaaatctagcgacaaaactcacacatgtccaccgtgcccagcacctgaagcagcagggggaccgtcagtcttcctcttccccccaaaacccaaggacaccctcatgatctcccggacccctgaggtcacatgcgtggtggtgagcgtgagccacgaagaccctgaggtcaagttcaactggtacgtggacggcgtggaggtgcataatgccaagacaaagccgcgggaggagcagtacaacagcacgtaccgtgtggtcagcgtcctcaccgtcctgcaccaggactggctgaatggcaaggagtacaagtgcaaggtctccaacaaagccctcccagcccccatcgagaaaaccatctccaaagccaaagggcagccccgagaaccacaggtgtacgtgtaccccccatcccgggaggagatgaccaagaaccaggtcagcctgacctgcctggtcaaaggcttctatcccagcgacatcgccgtggagtgggagagcaatgggcagccggagaacaactacaagaccacgcctcccgtgctggactccgacggctccttcgccctcgtgagcaagctcaccgtggacaagtctagatggcagcaggggaacgtcttctcatgctccgtgatgcatgaggctctgcacaaccactacacgcagaagagcctctccctgtctccgggtaaa

SEQ ID NO: 305 - DNA, 1425 bp, synthetic construct
  misc_feature 1..1425: note = Description of Artificial Sequence: Synthetic polynucleotide
  source 1..1425: mol_type = other DNA
gacatccagatgacccagagcccaagcagcctgagcgccagcgtcggcgaccgcgtgaccatcacctgtcgtgcccgccagagcatcggcaccgccatccactggtaccagcagaagccaggcaaggccccaaagctgctgatctactacgccagcgagagcatcagcggtgtgccaagccgcttcagcggcagcggcagcggcaccgacttcaccctgaccatcagcagcgtgcagccagaggacttcgccacctactactgccagcagagcggcagctggccatacaccttcggccagggcaccaagctggagatcaagggcggatctgagggaaagtccagcggctccggcagcgaaagcaagtccaccggcggaagcgaggtgcagctggtggagagcggtggcggtctggtgaagccaggtggcagcctgcgcctgagctgtgccgccagcggtttcaccttcagccgctacaacatgaactgggtgcgccaagccccaggcaagggcctggagtgggtgagcagcatcagcaccagcagcaactacatctactacgccgacagcgtgaagggccgcttcaccttcagccgcgacaacgccaagaacagcctggacctgcagatgagcggtctgcgcgccgaggacaccgccatctactactgcacccgcggttggggcccattcgactactggggccagggcaccctggtgaccgtgagcagcgagcccaaatctagcgacaaaactcacacatgtccaccgtgcccagcacctgaagcagcagggggaccgtcagtcttcctcttccccccaaaacccaaggacaccctcatgatctcccggacccctgaggtcacatgcgtggtggtgagcgtgagccacgaagaccctgaggtcaagttcaactggtacgtggacggcgtggaggtgcataatgccaagacaaagccgcgggaggagcagtacaacagcacgtaccgtgtggtcagcgtcctcaccgtcctgcaccaggactggctgaatggcaaggagtacaagtgcaaggtctccaacaaagccctcccagcccccatcgagaaaaccatctccaaagccaaagggcagccccgagaaccacaggtgtacgtgtaccccccatcccgggaggagatgaccaagaaccaggtcagcctgacctgcctggtcaaaggcttctatcccagcgacatcgccgtggagtgggagagcaatgggcagccggagaacaactacaagaccacgcctcccgtgctggactccgacggctccttcgccctcgtgagcaagctcaccgtggacaagtctagatggcagcaggggaacgtcttctcatgctccgtgatgcatgaggctctgcacaaccactacacgcagaagagcctctccctgtctccgggtaaa

SEQ ID NO: 306 - DNA, 1425 bp, synthetic construct
  misc_feature 1..1425: note = Description of Artificial Sequence: Synthetic polynucleotide
  source 1..1425: mol_type = other DNA
gaggtgcagctggtggagagcggtggcggtctggtgaagccaggtggcagcctgcgcctgagctgtgccgccagcggtttcaccttcagccgctacaacatgaactgggtgcgccaagccccaggcaagggcctggagtgggtgagcagcatcagcaccagcagcaactacatctactacgccgacagcgtgaagggccgcttcaccttcagccgcgacaacgccaagaacagcctggacctgcagatgagcggtctgcgcgccgaggacaccgccatctactactgcacccgcggttggggcccattcgactactggggccagggcaccctggtgaccgtgagcagcggcggatctgagggaaagtccagcggctccggcagcgaaagcaagtccaccggcggaagcgacatccagatgacccagagcccaagcagcctgagcgccagcgtcggcgaccgcgtgaccatcacctgtcgtgcccgccagagcatcggcaccgccatccactggtaccagcagaagccaggcaaggccccaaagctgctgatcaagtacgccagcgagagcatcagcggtgtgccaagccgcttcagcggcagcggcagcggcaccgacttcaccctgaccatcagcagcctgcagccagaggacttcgccacctactactgccagcagagcggcagctggccatacaccttcggccagggcaccaagctggagatcaaggagcccaaatctagcgacaaaactcacacatgtccaccgtgcccagcacctgaagcagcagggggaccgtcagtcttcctcttccccccaaaacccaaggacaccctcatgatctcccggacccctgaggtcacatgcgtggtggtgagcgtgagccacgaagaccctgaggtcaagttcaactggtacgtggacggcgtggaggtgcataatgccaagacaaagccgcgggaggagcagtacaacagcacgtaccgtgtggtcagcgtcctcaccgtcctgcaccaggactggctgaatggcaaggagtacaagtgcaaggtctccaacaaagccctcccagcccccatcgagaaaaccatctccaaagccaaagggcagccccgagaaccacaggtgtacgtgtaccccccatcccgggaggagatgaccaagaaccaggtcagcctgacctgcctggtcaaaggcttctatcccagcgacatcgccgtggagtgggagagcaatgggcagccggagaacaactacaagaccacgcctcccgtgctggactccgacggctccttcgccctcgtgagcaagctcaccgtggacaagtctagatggcagcaggggaacgtcttctcatgctccgtgatgcatgaggctctgcacaaccactacacgcagaagagcctctccctgtctccgggtaaa

SEQ ID NO: 307 - DNA, 1425 bp, synthetic construct
  misc_feature 1..1425: note = Description of Artificial Sequence: Synthetic polynucleotide
  source 1..1425: mol_type = other DNA
gacatccagatgacccagagcccaagcagcctgagcgccagcgtcggcgaccgcgtgaccatcacctgtcgtgcccgccagagcatcggcaccgccatccactggtaccagcagaagccaggcaaggccccaaagctgctgatcaagtacgccagcgagagcatcagcggtgtgccaagccgcttcagcggcagcggcagcggcaccgacttcaccctgaccatcagcagcctgcagccagaggacttcgccacctactactgccagcagagcggcagctggccatacaccttcggccagggcaccaagctggagatcaagggcggatctgagggaaagtccagcggctccggcagcgaaagcaagtccaccggcggaagcgaggtgcagctggtggagagcggtggcggtctggtgaagccaggtggcagcctgcgcctgagctgtgccgccagcggtttcaccttcagccgctacaacatgaactgggtgcgccaagccccaggcaagggcctggagtgggtgagcagcatcagcaccagcagcaactacatctactacgccgacagcgtgaagggccgcttcaccttcagccgcgacaacgccaagaacagcctggacctgcagatgagcggtctgcgcgccgaggacaccgccatctactactgcacccgcggttggggcccattcgactactggggccagggcaccctggtgaccgtgagcagcgagcccaaatctagcgacaaaactcacacatgtccaccgtgcccagcacctgaagcagcagggggaccgtcagtcttcctcttccccccaaaacccaaggacaccctcatgatctcccggacccctgaggtcacatgcgtggtggtgagcgtgagccacgaagaccctgaggtcaagttcaactggtacgtggacggcgtggaggtgcataatgccaagacaaagccgcgggaggagcagtacaacagcacgtaccgtgtggtcagcgtcctcaccgtcctgcaccaggactggctgaatggcaaggagtacaagtgcaaggtctccaacaaagccctcccagcccccatcgagaaaaccatctccaaagccaaagggcagccccgagaaccacaggtgtacgtgtaccccccatcccgggaggagatgaccaagaaccaggtcagcctgacctgcctggtcaaaggcttctatcccagcgacatcgccgtggagtgggagagcaatgggcagccggagaacaactacaagaccacgcctcccgtgctggactccgacggctccttcgccctcgtgagcaagctcaccgtggacaagtctagatggcagcaggggaacgtcttctcatgctccgtgatgcatgaggctctgcacaaccactacacgcagaagagcctctccctgtctccgggtaaa

SEQ ID NO: 308 - DNA, 1425 bp, synthetic construct
  misc_feature 1..1425: note = Description of Artificial Sequence: Synthetic polynucleotide
  source 1..1425: mol_type = other DNA
gaggtgcagctggtggagagcggtggcggtctggtgaagccaggtggcagcctgcgcctgagctgtgccgccagcggtttcaccttcagccgctacaacatgaactgggtgcgccaagccccaggcaagggcctggagtgggtgagcagcatcagcaccagcagcaactacatctactacgccgacagcgtgaagggccgcttcaccttcagccgcgacaacgccaagaacagcctggacctgcagatgagcggtctgcgcgccgaggacaccgccatctactactgcacccgcggttggggcccattcgactactggggccagggcaccctggtgaccgtgagcagcggcggatctgagggaaagtccagcggctccggcagcgaaagcaagtccaccggcggaagcgacatccagatgacccagagcccaagcagcctgagcgccagcgtcggcgaccgcgtgaccatcacctgtcgtgcccgccagagcatcggcaccgccatccactggtaccagcagaagccaggcaaggccccaaagctgctgatcaagtacgccagcgagagcatcagcggtgtgccaagccgcttcagcggcagcggcagcggcaccgacttcaccctgaccatcagcagcgtgcagccagaggacttcgccacctactactgccagcagagcggcagctggccatacaccttcggccagggcaccaagctggagatcaaggagcccaaatctagcgacaaaactcacacatgtccaccgtgcccagcacctgaagcagcagggggaccgtcagtcttcctcttccccccaaaacccaaggacaccctcatgatctcccggacccctgaggtcacatgcgtggtggtgagcgtgagccacgaagaccctgaggtcaagttcaactggtacgtggacggcgtggaggtgcataatgccaagacaaagccgcgggaggagcagtacaacagcacgtaccgtgtggtcagcgtcctcaccgtcctgcaccaggactggctgaatggcaaggagtacaagtgcaaggtctccaacaaagccctcccagcccccatcgagaaaaccatctccaaagccaaagggcagccccgagaaccacaggtgtacgtgtaccccccatcccgggaggagatgaccaagaaccaggtcagcctgacctgcctggtcaaaggcttctatcccagcgacatcgccgtggagtgggagagcaatgggcagccggagaacaactacaagaccacgcctcccgtgctggactccgacggctccttcgccctcgtgagcaagctcaccgtggacaagtctagatggcagcaggggaacgtcttctcatgctccgtgatgcatgaggctctgcacaaccactacacgcagaagagcctctccctgtctccgggtaaa

SEQ ID NO: 309 - DNA, 1425 bp, synthetic construct
  misc_feature 1..1425: note = Description of Artificial Sequence: Synthetic polynucleotide
  source 1..1425: mol_type = other DNA
gacatccagatgacccagagcccaagcagcctgagcgccagcgtcggcgaccgcgtgaccatcacctgtcgtgcccgccagagcatcggcaccgccatccactggtaccagcagaagccaggcaaggccccaaagctgctgatcaagtacgccagcgagagcatcagcggtgtgccaagccgcttcagcggcagcggcagcggcaccgacttcaccctgaccatcagcagcgtgcagccagaggacttcgccacctactactgccagcagagcggcagctggccatacaccttcggccagggcaccaagctggagatcaagggcggatctgagggaaagtccagcggctccggcagcgaaagcaagtccaccggcggaagcgaggtgcagctggtggagagcggtggcggtctggtgaagccaggtggcagcctgcgcctgagctgtgccgccagcggtttcaccttcagccgctacaacatgaactgggtgcgccaagccccaggcaagggcctggagtgggtgagcagcatcagcaccagcagcaactacatctactacgccgacagcgtgaagggccgcttcaccttcagccgcgacaacgccaagaacagcctggacctgcagatgagcggtctgcgcgccgaggacaccgccatctactactgcacccgcggttggggcccattcgactactggggccagggcaccctggtgaccgtgagcagcgagcccaaatctagcgacaaaactcacacatgtccaccgtgcccagcacctgaagcagcagggggaccgtcagtcttcctcttccccccaaaacccaaggacaccctcatgatctcccggacccctgaggtcacatgcgtggtggtgagcgtgagccacgaagaccctgaggtcaagttcaactggtacgtggacggcgtggaggtgcataatgccaagacaaagccgcgggaggagcagtacaacagcacgtaccgtgtggtcagcgtcctcaccgtcctgcaccaggactggctgaatggcaaggagtacaagtgcaaggtctccaacaaagccctcccagcccccatcgagaaaaccatctccaaagccaaagggcagccccgagaaccacaggtgtacgtgtaccccccatcccgggaggagatgaccaagaaccaggtcagcctgacctgcctggtcaaaggcttctatcccagcgacatcgccgtggagtgggagagcaatgggcagccggagaacaactacaagaccacgcctcccgtgctggactccgacggctccttcgccctcgtgagcaagctcaccgtggacaagtctagatggcagcaggggaacgtcttctcatgctccgtgatgcatgaggctctgcacaaccactacacgcagaagagcctctccctgtctccgggtaaa

SEQ ID NO: 310 - DNA, 1425 bp, synthetic construct
  misc_feature 1..1425: note = Description of Artificial Sequence: Synthetic polynucleotide
  source 1..1425: mol_type = other DNA
gaggtgcagctggtggagagcggtggcggtctggtgaagccaggtggcagcctgcgcctgagctgtgccgccagcggtttcaccttcagccgctacaacatgaactgggtgcgccaagccccaggcaagggcctggagtgggtgagcagcatcagcaccagcagcaactacatctactacgccgacagcgtgaagggccgcttcaccttcagccgcgacaacgccaagaacagcctggacctgcagatgagcggtctgcgcgccgaggacaccgccatctactactgcacccgcggttggggcccattcgactactggggccagggcaccctggtgaccgtgagcagcggcggatctgagggaaagtccagcggctccggcagcgaaagcaagtccaccggcggaagcgacatccagatgacccagagcccaagcagcctgagcgccagcgtcggcgaccgcgtgaccatcacctgtcgtgcccgccagagcatcggcaccgccatccactggtaccagcagaagccaggcaaggccccaaagctgctgatctactacgccagcgagagcatcagcggtgtgccaagccgcttcagcggcagcggcagcggcaccgacttcaccctgaccatcagcagcctgcagccagaggacttcgccacctactactgccagcagagcggcagctggccatacaccttcggccagggcaccaagctggagatcaaggagcccaaatctagcgacaaaactcacacatgtccaccgtgcccagcacctgaagcagcagggggaccgtcagtcttcctcttccccccaaaacccaaggacaccctcatgatctcccggacccctgaggtcacatgcgtggtggtgagcgtgagccacgaagaccctgaggtcaagttcaactggtacgtggacggcgtggaggtgcataatgccaagacaaagccgcgggaggagcagtacaacagcacgtaccgtgtggtcagcgtcctcaccgtcctgcaccaggactggctgaatggcaaggagtacaagtgcaaggtctccaacaaagccctcccagcccccatcgagaaaaccatctccaaagccaaagggcagccccgagaaccacaggtgtacgtgtaccccccatcccgggaggagatgaccaagaaccaggtcagcctgacctgcctggtcaaaggcttctatcccagcgacatcgccgtggagtgggagagcaatgggcagccggagaacaactacaagaccacgcctcccgtgctggactccgacggctccttcgccctcgtgagcaagctcaccgtggacaagtctagatggcagcaggggaacgtcttctcatgctccgtgatgcatgaggctctgcacaaccactacacgcagaagagcctctccctgtctccgggtaaa

SEQ ID NO: 311 - DNA, 1425 bp, synthetic construct
  misc_feature 1..1425: note = Description of Artificial Sequence: Synthetic polynucleotide
  source 1..1425: mol_type = other DNA
gacatccagatgacccagagcccaagcagcctgagcgccagcgtcggcgaccgcgtgaccatcacctgtcgtgcccgccagagcatcggcaccgccatccactggtaccagcagaagccaggcaaggccccaaagctgctgatctactacgccagcgagagcatcagcggtgtgccaagccgcttcagcggcagcggcagcggcaccgacttcaccctgaccatcagcagcctgcagccagaggacttcgccacctactactgccagcagagcggcagctggccatacaccttcggccagggcaccaagctggagatcaagggcggatctgagggaaagtccagcggctccggcagcgaaagcaagtccaccggcggaagcgaggtgcagctggtggagagcggtggcggtctggtgaagccaggtggcagcctgcgcctgagctgtgccgccagcggtttcaccttcagccgctacaacatgaactgggtgcgccaagccccaggcaagggcctggagtgggtgagcagcatcagcaccagcagcaactacatctactacgccgacagcgtgaagggccgcttcaccttcagccgcgacaacgccaagaacagcctggacctgcagatgagcggtctgcgcgccgaggacaccgccatctactactgcacccgcggttggggcccattcgactactggggccagggcaccctggtgaccgtgagcagcgagcccaaatctagcgacaaaactcacacatgtccaccgtgcccagcacctgaagcagcagggggaccgtcagtcttcctcttccccccaaaacccaaggacaccctcatgatctcccggacccctgaggtcacatgcgtggtggtgagcgtgagccacgaagaccctgaggtcaagttcaactggtacgtggacggcgtggaggtgcataatgccaagacaaagccgcgggaggagcagtacaacagcacgtaccgtgtggtcagcgtcctcaccgtcctgcaccaggactggctgaatggcaaggagtacaagtgcaaggtctccaacaaagccctcccagcccccatcgagaaaaccatctccaaagccaaagggcagccccgagaaccacaggtgtacgtgtaccccccatcccgggaggagatgaccaagaaccaggtcagcctgacctgcctggtcaaaggcttctatcccagcgacatcgccgtggagtgggagagcaatgggcagccggagaacaactacaagaccacgcctcccgtgctggactccgacggctccttcgccctcgtgagcaagctcaccgtggacaagtctagatggcagcaggggaacgtcttctcatgctccgtgatgcatgaggctctgcacaaccactacacgcagaagagcctctccctgtctccgggtaaa

SEQ ID NO: 312 - DNA, 1425 bp, synthetic construct
  misc_feature 1..1425: note = Description of Artificial Sequence: Synthetic polynucleotide
  source 1..1425: mol_type = other DNA
gaggtgcaactggtggagtctgggggaggcctggtcaagcctggggggtccctgagactctcctgtgcagcctctggattcaccttcagtagatataacatgaactgggtccgccaggctccagggaaggggctggagtgggtctcatccattagtactagtagtaattacatatactacgcagactcagtgaagggccgattcaccttctccagagacaacgccaagaactcactggatctgcaaatgagcggcctgagagccgaggacacggctatttattactgtacgagaggctgggggccttttgactactggggccagggaaccctggtcaccgtctcctcaggcggatctgagggaaagtccagcggctccggcagcgaaagcaagtccaccggcggaagcgacatcttgctgactcagtctccaggcatcctgtctgtgagtccaggagaaagagtcagtttctcctgcagggccagacagagcattggcacagccatacactggtatcagcaaagaacaaatggttctccaaggcttctcataaagtatgcttctgagtctatctctgggatcccttccaggtttagcggcagtggatcagggacagattttactcttaccatcaacagtgtggagtctgaagatattgcagattattactgtcaacaaagtgggagctggccgtacacgttcggaggggggaccaagctggaaataaaagagcccaaatctagcgacaaaactcacacatgtccaccgtgcccagcacctgaagcagcagggggaccgtcagtcttcctcttccccccaaaacccaaggacaccctcatgatctcccggacccctgaggtcacatgcgtggtggtgagcgtgagccacgaagaccctgaggtcaagttcaactggtacgtggacggcgtggaggtgcataatgccaagacaaagccgcgggaggagcagtacaacagcacgtaccgtgtggtcagcgtcctcaccgtcctgcaccaggactggctgaatggcaaggagtacaagtgcaaggtctccaacaaagccctcccagcccccatcgagaaaaccatctccaaagccaaagggcagccccgagaaccacaggtgtacgtgtaccccccatcccgggaggagatgaccaagaaccaggtcagcctgacctgcctggtcaaaggcttctatcccagcgacatcgccgtggagtgggagagcaatgggcagccggagaacaactacaagaccacgcctcccgtgctggactccgacggctccttcgccctcgtgagcaagctcaccgtggacaagtctagatggcagcaggggaacgtcttctcatgctccgtgatgcatgaggctctgcacaaccactacacgcagaagagcctctccctgtctccgggtaaa

SEQ ID NO: 313 - DNA, 1425 bp, synthetic construct
  misc_feature 1..1425: note = Description of Artificial Sequence: Synthetic polynucleotide
  source 1..1425: mol_type = other DNA
gacatcttgctgactcagtctccaggcatcctgtctgtgagtccaggagaaagagtcagtttctcctgcagggccagacagagcattggcacagccatacactggtatcagcaaagaacaaatggttctccaaggcttctcataaagtatgcttctgagtctatctctgggatcccttccaggtttagcggcagtggatcagggacagattttactcttaccatcaacagtgtggagtctgaagatattgcagattattactgtcaacaaagtgggagctggccgtacacgttcggaggggggaccaagctggaaataaaaggcggatctgagggaaagtccagcggctccggcagcgaaagcaagtccaccggcggaagcgaggtgcaactggtggagtctgggggaggcctggtcaagcctggggggtccctgagactctcctgtgcagcctctggattcaccttcagtagatataacatgaactgggtccgccaggctccagggaaggggctggagtgggtctcatccattagtactagtagtaattacatatactacgcagactcagtgaagggccgattcaccttctccagagacaacgccaagaactcactggatctgcaaatgagcggcctgagagccgaggacacggctatttattactgtacgagaggctgggggccttttgactactggggccagggaaccctggtcaccgtctcctcagagcccaaatctagcgacaaaactcacacatgtccaccgtgcccagcacctgaagcagcagggggaccgtcagtcttcctcttccccccaaaacccaaggacaccctcatgatctcccggacccctgaggtcacatgcgtggtggtgagcgtgagccacgaagaccctgaggtcaagttcaactggtacgtggacggcgtggaggtgcataatgccaagacaaagccgcgggaggagcagtacaacagcacgtaccgtgtggtcagcgtcctcaccgtcctgcaccaggactggctgaatggcaaggagtacaagtgcaaggtctccaacaaagccctcccagcccccatcgagaaaaccatctccaaagccaaagggcagccccgagaaccacaggtgtacgtgtaccccccatcccgggaggagatgaccaagaaccaggtcagcctgacctgcctggtcaaaggcttctatcccagcgacatcgccgtggagtgggagagcaatgggcagccggagaacaactacaagaccacgcctcccgtgctggactccgacggctccttcgccctcgtgagcaagctcaccgtggacaagtctagatggcagcaggggaacgtcttctcatgctccgtgatgcatgaggctctgcacaaccactacacgcagaagagcctctccctgtctccgggtaaa

SEQ ID NO: 314 - protein, 330 aa, synthetic construct
  REGION 1..330: note = Description of Artificial Sequence: Synthetic polypeptide
ASTKGPSVFPLAPSSKSTSGGTAALGCLVKDYFPEPVTVSWNSGALTSGVHTFPAVLQSSGLYSLSSVVTVPSSSLGTQTYICNVNHKPSNTKVDKKVEPKSCDKTHTCPPCPAPEAAGGPSVFLFPPKPKDTLMISRTPEVTCVVVSVSHEDPEVKFNWYVDGVEVHNAKTKPREEQYNSTYRVVSVLTVLHQDWLNGKEYKCKVSNKALPAPIEKTISKAKGQPREPQVYVYPPSREEMTKNQVSLTCLVKGFYPSDIAVEWESNGQPENNYKTTPPVLDSDGSFALVSKLTVDKSRWQQGNVFSCSVMHEALHNHYTQKSLSLSPGK

SEQ ID NO: 315 - DNA, 1338 bp, synthetic construct
  misc_feature 1..1338: note = Description of Artificial Sequence: Synthetic polynucleotide
  source 1..1338: mol_type = other DNA
gaggtgcagctggtggagagcggtggcggtctggtgaagccaggtggcagcctgcgcctgagctgtgccgccagcggtttcaccttcagccgctacaacatgaactgggtgcgccaagccccaggcaagggcctggagtgggtgagcagcatcagcaccagcagcaactacatctactacgccgacagcgtgaagggccgcttcaccttcagccgcgacaacgccaagaacagcctggacctgcagatgagcggtctgcgcgccgaggacaccgccatctactactgcacccgcggttggggcccattcgactactggggccagggcaccctggtgaccgtgagcagcgcctccaccaagggcccatcggtcttccccctggcaccctcctccaagagcacctctgggggcacagcggccctgggctgcctggtcaaggactacttccccgaaccggtgacggtgtcgtggaactcaggcgccctgaccagcggcgtgcacaccttcccggctgtcctacagtcctcaggactctactccctcagcagcgtggtgaccgtgccctccagcagcttgggcacccagacctacatctgcaacgtgaatcacaagcccagcaacaccaaggtggacaagaaagttgagcccaaatcttgtgacaaaactcacacatgtccaccgtgcccagcacctgaagcagcagggggaccgtcagtcttcctcttccccccaaaacccaaggacaccctcatgatctcccggacccctgaggtcacatgcgtggtggtgagcgtgagccacgaagaccctgaggtcaagttcaactggtacgtggacggcgtggaggtgcataatgccaagacaaagccgcgggaggagcagtacaacagcacgtaccgtgtggtcagcgtcctcaccgtcctgcaccaggactggctgaatggcaaggagtacaagtgcaaggtctccaacaaagccctcccagcccccatcgagaaaaccatctccaaagccaaagggcagccccgagaaccacaggtgtacgtgtaccccccatcccgggaggagatgaccaagaaccaggtcagcctgacctgcctggtcaaaggcttctatcccagcgacatcgccgtggagtgggagagcaatgggcagccggagaacaactacaagaccacgcctcccgtgctggactccgacggctccttcgccctcgtgagcaagctcaccgtggacaagtctagatggcagcaggggaacgtcttctcatgctccgtgatgcatgaggctctgcacaaccactacacgcagaagagcctctccctgtctccgggtaaa

SEQ ID NO: 316 - DNA, 642 bp, synthetic construct
  misc_feature 1..642: note = Description of Artificial Sequence: Synthetic polynucleotide
  source 1..642: mol_type = other DNA
gacatccagatgacccagagcccaagcagcctgagcgccagcgtcggcgaccgcgtgaccatcacctgtcgtgcccgccagagcatcggcaccgccatccactggtaccagcagaagccaggcaaggccccaaagctgctgatctactacgccagcgagagcatcagcggtgtgccaagccgcttcagcggcagcggcagcggcaccgacttcaccctgaccatcagcagcgtgcagccagaggacttcgccacctactactgccagcagagcggcagctggccatacaccttcggccagggcaccaagctggagatcaagcgtacggtggctgcaccatctgtcttcatcttcccgccatctgatgagcagttgaaatctggaactgcctctgttgtgtgcctgctgaataacttctatcccagagaggccaaagtacagtggaaggtggataacgccctccaatcgggtaactcccaggagagtgtcacagagcaggacagcaaggacagcacctacagcctcagcagcaccctgacgctgagcaaagcagactacgagaaacacaaagtctacgcctgcgaagtcacccatcagggcctgagctcgcccgtcacaaagagcttcaacaggggagagtgt

SEQ ID NO: 317 - DNA, 642 bp, synthetic construct
  misc_feature 1..642: note = Description of Artificial Sequence: Synthetic polynucleotide
  source 1..642: mol_type = other DNA
gacatccagatgacccagagcccaagcagcctgagcgccagcgtcggcgaccgcgtgaccatcacctgtcgtgcccgccagagcatcggcaccgccatccactggtaccagcagaagccaggcaaggccccaaagctgctgatcaagtacgccagcgagagcatcagcggtgtgccaagccgcttcagcggcagcggcagcggcaccgacttcaccctgaccatcagcagcctgcagccagaggacttcgccacctactactgccagcagagcggcagctggccatacaccttcggccagggcaccaagctggagatcaagcgtacggtggctgcaccatctgtcttcatcttcccgccatctgatgagcagttgaaatctggaactgcctctgttgtgtgcctgctgaataacttctatcccagagaggccaaagtacagtggaaggtggataacgccctccaatcgggtaactcccaggagagtgtcacagagcaggacagcaaggacagcacctacagcctcagcagcaccctgacgctgagcaaagcagactacgagaaacacaaagtctacgcctgcgaagtcacccatcagggcctgagctcgcccgtcacaaagagcttcaacaggggagagtgt

SEQ ID NO: 318 - DNA, 642 bp, synthetic construct
  misc_feature 1..642: note = Description of Artificial Sequence: Synthetic polynucleotide
  source 1..642: mol_type = other DNA
gacatccagatgacccagagcccaagcagcctgagcgccagcgtcggcgaccgcgtgaccatcacctgtcgtgcccgccagagcatcggcaccgccatccactggtaccagcagaagccaggcaaggccccaaagctgctgatcaagtacgccagcgagagcatcagcggtgtgccaagccgcttcagcggcagcggcagcggcaccgacttcaccctgaccatcagcagcgtgcagccagaggacttcgccacctactactgccagcagagcggcagctggccatacaccttcggccagggcaccaagctggagatcaagcgtacggtggctgcaccatctgtcttcatcttcccgccatctgatgagcagttgaaatctggaactgcctctgttgtgtgcctgctgaataacttctatcccagagaggccaaagtacagtggaaggtggataacgccctccaatcgggtaactcccaggagagtgtcacagagcaggacagcaaggacagcacctacagcctcagcagcaccctgacgctgagcaaagcagactacgagaaacacaaagtctacgcctgcgaagtcacccatcagggcctgagctcgcccgtcacaaagagcttcaacaggggagagtgt

SEQ ID NO: 319 - DNA, 642 bp, synthetic construct
  misc_feature 1..642: note = Description of Artificial Sequence: Synthetic polynucleotide
  source 1..642: mol_type = other DNA
gacatccagatgacccagagcccaagcagcctgagcgccagcgtcggcgaccgcgtgaccatcacctgtcgtgcccgccagagcatcggcaccgccatccactggtaccagcagaagccaggcaaggccccaaagctgctgatctactacgccagcgagagcatcagcggtgtgccaagccgcttcagcggcagcggcagcggcaccgacttcaccctgaccatcagcagcctgcagccagaggacttcgccacctactactgccagcagagcggcagctggccatacaccttcggccagggcaccaagctggagatcaagcgtacggtggctgcaccatctgtcttcatcttcccgccatctgatgagcagttgaaatctggaactgcctctgttgtgtgcctgctgaataacttctatcccagagaggccaaagtacagtggaaggtggataacgccctccaatcgggtaactcccaggagagtgtcacagagcaggacagcaaggacagcacctacagcctcagcagcaccctgacgctgagcaaagcagactacgagaaacacaaagtctacgcctgcgaagtcacccatcagggcctgagctcgcccgtcacaaagagcttcaacaggggagagtgt

SEQ ID NO: 320 - DNA, 642 bp, synthetic construct
  misc_feature 1..642: note = Description of Artificial Sequence: Synthetic polynucleotide
  source 1..642: mol_type = other DNA
gacatcttgctgactcagtctccaggcatcctgtctgtgagtccaggagaaagagtcagtttctcctgcagggccagacagagcattggcacagccatacactggtatcagcaaagaacaaatggttctccaaggcttctcataaagtatgcttctgagtctatctctgggatcccttccaggtttagcggcagtggatcagggacagattttactcttaccatcaacagtgtggagtctgaagatattgcagattattactgtcaacaaagtgggagctggccgtacacgttcggaggggggaccaagctggaaataaaacgtacggtggctgcaccatctgtcttcatcttcccgccatctgatgagcagttgaaatctggaactgcctctgttgtgtgcctgctgaataacttctatcccagagaggccaaagtacagtggaaggtggataacgccctccaatcgggtaactcccaggagagtgtcacagagcaggacagcaaggacagcacctacagcctcagcagcaccctgacgctgagcaaagcagactacgagaaacacaaagtctacgcctgcgaagtcacccatcagggcctgagctcgcccgtcacaaagagcttcaacaggggagagtgt

SEQ ID NO: 321 - protein, 231 aa, synthetic construct
  REGION 1..231: note = Description of Artificial Sequence: Synthetic polypeptide
EPKSSDKTHTCPPCPAPEAAGGPSVFLFPPKPKDTLMISRTPEVTCVVVSVSHEDPEVKFNWYVDGVEVHNAKTKPREEQYNSTYRVVSVLTVLHQDWLNGKEYKCKVSNKALPAPIEKTISKAKGQPREPQVYVLPPSREEMTKNQVSLLCLVKGFYPSDIAVEWESNGQPENNYLTWPPVLDSDGSFFLYSKLTVDKSRWQQGNVFSCSVMHEALHNHYTQKSLSLSPG

SEQ ID NO: 322 - protein, 479 aa, synthetic construct
  REGION 1..479: note = Description of Artificial Sequence: Synthetic polypeptide
EIVLTQSPATLSLSPGERATLSCRASESVEYFGTSLMHWYQQKPGQPPRLLIYAASNVESGIPARFSGSGSGTDFTLTISSVEPEDFAVYFCQQTRKVPYTFGGGTKVEIKGGSEGKSSGSGSESKSTGGSQVQLQESGPGLVKPSQTLSLTCTVSGNSITSDYAWNWIRQFPGKRLEWIGYISYSGSTTYNPSLKSRVTISRDTSKNQFSLKLSSVTAADTAVYYCATGYYYGSGFWGQGTLVTVSSEPKSSDKTHTCPPCPAPEAAGGPSVFLFPPKPKDTLMISRTPEVTCVVVSVSHEDPEVKFNWYVDGVEVHNAKTKPREEQYNSTYRVVSVLTVLHQDWLNGKEYKCKVSNKALPAPIEKTISKAKGQPREPQVYVLPPSREEMTKNQVSLLCLVKGFYPSDIAVEWESNGQPENNYLTWPPVLDSDGSFFLYSKLTVDKSRWQQGNVFSCSVMHEALHNHYTQKSLSLSPG

SEQ ID NO: 323 - protein, 482 aa, synthetic construct
  REGION 1..482: note = Description of Artificial Sequence: Synthetic polypeptide
EIVLTQSPSFLSASVGDRVTITCRASQGISSYLSWYQQKPGKAPKLLIYATSTLQSGVPSRFSGSGSGTEFTLTISSLQPEDFATYYCQQLNSYPRTFGQGTKVEIKGGSEGKSSGSGSESKSTGGSEVQLVESGGGLVQPGGSLRLSCAASGFTFSSYWMTWVRQAPGKGLEWVANIKQDGSERYYVDSVKGRFTISRDNAKNSLYLQMNSLRAEDTAVYYCARDQNYDILTGHYGMDVWGQGTTVTVSSEPKSSDKTHTCPPCPAPEAAGGPSVFLFPPKPKDTLMISRTPEVTCVVVSVSHEDPEVKFNWYVDGVEVHNAKTKPREEQYNSTYRVVSVLTVLHQDWLNGKEYKCKVSNKALPAPIEKTISKAKGQPREPQVYVLPPSREEMTKNQVSLLCLVKGFYPSDIAVEWESNGQPENNYLTWPPVLDSDGSFFLYSKLTVDKSRWQQGNVFSCSVMHEALHNHYTQKSLSLSPG

SEQ ID NO: 324 - protein, 481 aa, synthetic construct
  REGION 1..481: note = Description of Artificial Sequence: Synthetic polypeptide
QSVLTQPPSVSVAPGQTASITCGGDNIGSKSVHWYQQKPGQAPVLVVYDNSDRPSGIPERFSGSNSGTTATLTISRVEAGDEADYYCQVWDSSSDHPVVFGGGTKVTVLGGSEGKSSGSGSESKSTGGSQVQLVESGGGVVQPGRSLRLSCAASGFTFSYYGMHWVRQAPGKGLEWVAFISYDGSNKYYADSVKGRFTISRDNSKNTLYLQMNSLRAEDTAVYYCAHLPYSGSYWAFDYWGQGTQVTVSSEPKSSDKTHTCPPCPAPEAAGGPSVFLFPPKPKDTLMISRTPEVTCVVVSVSHEDPEVKFNWYVDGVEVHNAKTKPREEQYNSTYRVVSVLTVLHQDWLNGKEYKCKVSNKALPAPIEKTISKAKGQPREPQVYVLPPSREEMTKNQVSLLCLVKGFYPSDIAVEWESNGQPENNYLTWPPVLDSDGSFFLYSKLTVDKSRWQQGNVFSCSVMHEALHNHYTQKSLSLSPG

SEQ ID NO: 325 - protein, 484 aa, synthetic construct
  REGION 1..484: note = Description of Artificial Sequence: Synthetic polypeptide
SSELTQPPSVSVAPGQTARITCGGNNIGSKSVHWYQQKPGQAPVLVVYDDSDRPSGIPERFSGSNSGNTATLTISRVEAGDEADYYCQVWDSSSDHVVFGGGTKLTVLGGSEGKSSGSGSESKSTGGSQVQLVESGGGLVQPGGSLRLSCAASGFTFSHYAMSWVRQAPGKGLEWVSTIGGSGGSTYYADSVKGRFTISRDNSKNTLYLQMNSLRAEDTAVYYCAKPHIVMVTALLYDGMDVWGQGTMVTVSSEPKSSDKTHTCPPCPAPEAAGGPSVFLFPPKPKDTLMISRTPEVTCVVVSVSHEDPEVKFNWYVDGVEVHNAKTKPREEQYNSTYRVVSVLTVLHQDWLNGKEYKCKVSNKALPAPIEKTISKAKGQPREPQVYVLPPSREEMTKNQVSLLCLVKGFYPSDIAVEWESNGQPENNYLTWPPVLDSDGSFFLYSKLTVDKSRWQQGNVFSCSVMHEALHNHYTQKSLSLSPG

SEQ ID NO: 326 - protein, 330 aa, synthetic construct
  REGION 1..330: note = Description of Artificial Sequence: Synthetic polypeptide
ASTKGPSVFPLAPSSKSTSGGTAALGCLVKDYFPEPVTVSWNSGALTSGVHTFPAVLQSSGLYSLSSVVTVPSSSLGTQTYICNVNHKPSNTKVDKKVEPKSCDKTHTCPPCPAPEAAGGPSVFLFPPKPKDTLMISRTPEVTCVVVSVSHEDPEVKFNWYVDGVEVHNAKTKPREEQYNSTYRVVSVLTVLHQDWLNGKEYKCKVSNKALPAPIEKTISKAKGQPREPQVYVLPPSREEMTKNQVSLLCLVKGFYPSDIAVEWESNGQPENNYLTWPPVLDSDGSFFLYSKLTVDKSRWQQGNVFSCSVMHEALHNHYTQKSLSLSPGK

SEQ ID NO: 327 - protein, 454 aa, synthetic construct
  REGION 1..454: note = Description of Artificial Sequence: Synthetic polypeptide
QVQLQESGPGLVKPSETLSLTCTVSGGSISSYYWSWIRQPPGKGLEWIGYIYYSGSTNYNPSLKSRVTISVDTSKNQFSLKLSSVTAADTAVYYCAGTTIFGVVTPNFYYGMDVWGQGTTVTVSSASTKGPSVFPLAPSSKSTSGGTAALGCLVKDYFPEPVTVSWNSGALTSGVHTFPAVLQSSGLYSLSSVVTVPSSSLGTQTYICNVNHKPSNTKVDKKVEPKSCDKTHTCPPCPAPEAAGGPSVFLFPPKPKDTLMISRTPEVTCVVVSVSHEDPEVKFNWYVDGVEVHNAKTKPREEQYNSTYRVVSVLTVLHQDWLNGKEYKCKVSNKALPAPIEKTISKAKGQPREPQVYVLPPSREEMTKNQVSLLCLVKGFYPSDIAVEWESNGQPENNYLTWPPVLDSDGSFFLYSKLTVDKSRWQQGNVFSCSVMHEALHNHYTQKSLSLSPG

SEQ ID NO: 328 - protein, 448 aa, synthetic construct
  REGION 1..448: note = Description of Artificial Sequence: Synthetic polypeptide
QVQLQESGPGLVKPSETLSLTCTVSGGSISSYYWSWLRQPAGSGLEWIGRLYVSGFTNYNPSLKSRVTLSLDPSRNQLSLKLSSVTAADTAVYYCAGDSGNYWGWFDPWGQGTLVTVSSASTKGPSVFPLAPSSKSTSGGTAALGCLVKDYFPEPVTVSWNSGALTSGVHTFPAVLQSSGLYSLSSVVTVPSSSLGTQTYICNVNHKPSNTKVDKKVEPKSCDKTHTCPPCPAPEAAGGPSVFLFPPKPKDTLMISRTPEVTCVVVSVSHEDPEVKFNWYVDGVEVHNAKTKPREEQYNSTYRVVSVLTVLHQDWLNGKEYKCKVSNKALPAPIEKTISKAKGQPREPQVYVLPPSREEMTKNQVSLLCLVKGFYPSDIAVEWESNGQPENNYLTWPPVLDSDGSFFLYSKLTVDKSRWQQGNVFSCSVMHEALHNHYTQKSLSLSPG

SEQ ID NO: 329 - protein, 452 aa, synthetic construct
  REGION 1..452: note = Description of Artificial Sequence: Synthetic polypeptide
EVQLVESGGGVVQPGRSLRLSCVASGFTFSSYDIHWVRQAPGKGLEWVAIISYDGSKKDYTDSVKGRFTISRDNSKNTLYLQMDSLRVEDSAVYSCARESGWSHYYYYGMDVWGQGTMVTVSSASTKGPSVFPLAPSSKSTSGGTAALGCLVKDYFPEPVTVSWNSGALTSGVHTFPAVLQSSGLYSLSSVVTVPSSSLGTQTYICNVNHKPSNTKVDKKVEPKSCDKTHTCPPCPAPEAAGGPSVFLFPPKPKDTLMISRTPEVTCVVVSVSHEDPEVKFNWYVDGVEVHNAKTKPREEQYNSTYRVVSVLTVLHQDWLNGKEYKCKVSNKALPAPIEKTISKAKGQPREPQVYVLPPSREEMTKNQVSLLCLVKGFYPSDIAVEWESNGQPENNYLTWPPVLDSDGSFFLYSKLTVDKSRWQQGNVFSCSVMHEALHNHYTQKSLSLSPG

SEQ ID NO: 330 - protein, 455 aa, synthetic construct
  REGION 1..455: note = Description of Artificial Sequence: Synthetic polypeptide
QVQLQESGPGLVKPSETLSLTCTVSGGSISSYYWSWIRQPPGKGLEWIGYIYYSGSTNYNPSLKSRVTISVDTSKNQFSLKLSSVTAADTAVYYCAGTTIFGVVTPNFYYGMDVWGQGTTVTVSSASTKGPSVFPLAPSSKSTSGGTAALGCLVKDYFPEPVTVSWNSGALTSGVHTFPAVLQSSGLYSLSSVVTVPSSSLGTQTYICNVNHKPSNTKVDKKVEPKSCDKTHTCPPCPAPEAAGGPSVFLFPPKPKDTLMISRTPEVTCVVVSVSHEDPEVKFNWYVDGVEVHNAKTKPREEQYNSTYRVVSVLTVLHQDWLNGKEYKCKVSNKALPAPIEKTISKAKGQPREPQVYVLPPSREEMTKNQVSLLCLVKGFYPSDIAVEWESNGQPENNYLTWPPVLDSDGSFFLYSKLTVDKSRWQQGNVFSCSVMHEALHNHYTQKSLSLSPGK

SEQ ID NO: 331 - protein, 475 aa, synthetic construct
  REGION 1..475: note = Description of Artificial Sequence: Synthetic polypeptide
DIQMTQSPSSLSASVGDRVTITCRARQSIGTAIHWYQQKPGKAPKLLIKYASESISGVPSRFSGSGSGTDFTLTISSLQPEDFATYYCQQSGSWPYTFGQGTKLEIKGGSEGKSSGSGSESKSTGGSEVQLVESGGGLVKPGGSLRLSCAASGFTFSRYNMNWVRQAPGKGLEWVSSISTSSNYIYYADSVKGRFTFSRDNAKNSLDLQMSGLRAEDTAIYYCTRGWGPFDYWGQGTLVTVSSEPKSSDKTHTCPPCPAPEAAGGPSVFLFPPKPKDTLMISRTPEVTCVVVSVSHEDPEVKFNWYVDGVEVHNAKTKPREEQYNSTYRVVSVLTVLHQDWLNGKEYKCKVSNKALPAPIEKTISKAKGQPREPQVYVYPPSREEMTKNQVSLTCLVKGFYPSDIAVEWESNGQPENNYKTTPPVLDSDGSFALVSKLTVDKSRWQQGNVFSCSVMHEALHNHYTQKSLSLSPGK

SEQ ID NO: 332 - DNA, 1437 bp, synthetic construct
  misc_feature 1..1437: note = Description of Artificial Sequence: Synthetic polynucleotide
  source 1..1437: mol_type = other DNA
gagattgttctcacccaatccccagctactctctctctttcacccggtgagcgggcaaccctctcctgtagagccagcgagagcgtggagtattttggcacatccctgatgcactggtatcagcaaaaaccaggacaaccccccagactcctcatatatgccgcctcaaatgtcgagagtgggatacctgcacggttttcaggaagcggcagcggtactgacttcacattgactatatcctctgtagagccagaggattttgcagtctacttctgccagcaaactaggaaggttccatatacttttgggggcggtacaaaagttgagataaagggcggctccgagggcaagagcagcggcagcggcagcgagagcaagagcaccggcggcagccaagtacagctccaggagtcaggacctgggctcgtcaaaccatctcagacattgtccctgacatgcacagtttccggcaacagtattacttccgactatgcttggaattggatcaggcaattcccaggaaagcggctcgagtggataggttatatttcttactctggatctactacctacaatcccagtttgaagtctcgcgtgacaattagccgggacacatcaaaaaatcaattctcacttaaacttagttctgtaaccgctgccgatacagccgtgtactactgcgccactggttattattatggaagcggattttgggggcaaggaactttggtgaccgtctcttccgagcccaaatctagcgacaaaactcacacatgtccaccgtgcccagcacctgaagcagcagggggaccgtcagtcttcctcttccccccaaaacccaaggacaccctcatgatctcccggacccctgaggtcacatgcgtggtggtgagcgtgagccacgaagaccctgaggtcaagttcaactggtacgtggacggcgtggaggtgcataatgccaagacaaagccgcgggaggagcagtacaacagcacgtaccgtgtggtcagcgtcctcaccgtcctgcaccaggactggctgaatggcaaggagtacaagtgcaaggtctccaacaaagccctcccagcccccatcgagaaaaccatctccaaagccaaagggcagccccgagaaccacaggtgtacgtgctgcccccatcccgggaggagatgaccaagaaccaggtcagcctgctgtgcctggtcaaaggcttctatcccagcgacatcgccgtggagtgggagagcaatgggcagccggagaacaactacctcacctggcctcccgtgctggactccgacggctccttcttcctctacagcaagctcaccgtggacaagtctagatggcagcaggggaacgtcttctcatgctccgtgatgcatgaggctctgcacaaccactacacgcagaagagcctctccctgtctccgggt

SEQ ID NO: 333 - DNA, 1356 bp, synthetic construct
  misc_feature 1..1356: note = Description of Artificial Sequence: Synthetic polynucleotide
  source 1..1356: mol_type = other DNA
gaggtacaacttgtcgaaagtggcggtggagtcgtccagcctgggcgatcacttcgcctctcctgtgtagcctctggtttcactttctcatcttacgacatacactgggtccgccaggcacctggtaaggggctggagtgggttgccatcattagttacgatggctccaaaaaagattacaccgatagcgtaaagggcagatttaccatttccagggataattcaaagaacaccctgtatctgcaaatggacagcctccgcgtcgaagactctgcagtttatagctgtgccagggagtcaggctggtcccattattactattatggtatggacgtttggggccagggaaccatggtcactgttagttcagcctccaccaagggcccatcggtcttccccctggcaccctcctccaagagcacctctgggggcacagcggccctgggctgcctggtcaaggactacttccccgaaccggtgacggtgtcgtggaactcaggcgccctgaccagcggcgtgcacaccttcccggctgtcctacagtcctcaggactctactccctcagcagcgtggtgaccgtgccctccagcagcttgggcacccagacctacatctgcaacgtgaatcacaagcccagcaacaccaaggtggacaagaaagttgagcccaaatcttgtgacaaaactcacacatgtccaccgtgcccagcacctgaagcagcagggggaccgtcagtcttcctcttccccccaaaacccaaggacaccctcatgatctcccggacccctgaggtcacatgcgtggtggtgagcgtgagccacgaagaccctgaggtcaagttcaactggtacgtggacggcgtggaggtgcataatgccaagacaaagccgcgggaggagcagtacaacagcacgtaccgtgtggtcagcgtcctcaccgtcctgcaccaggactggctgaatggcaaggagtacaagtgcaaggtctccaacaaagccctcccagcccccatcgagaaaaccatctccaaagccaaagggcagccccgagaaccacaggtgtacgtgctgcccccatcccgggaggagatgaccaagaaccaggtcagcctgctgtgcctggtcaaaggcttctatcccagcgacatcgccgtggagtgggagagcaatgggcagccggagaacaactacctcacctggcctcccgtgctggactccgacggctccttcttcctctacagcaagctcaccgtggacaagtctagatggcagcaggggaacgtcttctcatgctccgtgatgcatgaggctctgcacaaccactacacgcagaagagcctctccctgtctccgggt

SEQ ID NO: 334 - DNA, 1443 bp, synthetic construct
  misc_feature 1..1443: note = Description of Artificial Sequence: Synthetic polynucleotide
  source 1..1443: mol_type = other DNA
cagagcgtacttacccagcctcccagcgtgtctgtagccccaggacagacagccagtattacatgcggtggtgacaatataggttccaaatccgtgcattggtaccagcagaagccagggcaagctcccgtgctcgtggtatatgataattccgaccgcccttccggcattcccgaacggtttagtggttcaaattcaggcaccacagcaactctgaccataagcagagtcgaagctggagacgaagccgactactactgtcaggtatgggactctagtagtgaccaccctgtcgtcttcggtgggggaaccaaagtgaccgttctgggcggctccgagggcaagagcagcggcagcggcagcgagagcaagagcaccggcggcagccaggtccagctcgtagaaagtgggggcggcgtagttcagccaggcaggagtctccggctgagttgtgcagccagcggctttactttttcctactatggaatgcactgggtacgtcaggcacccggcaaaggtttggagtgggtcgcattcatttcttatgatggatcaaataagtattatgccgatagtgtaaagggcagatttacaataagtcgagacaactcaaagaacactctctacctccaaatgaatagtcttcgggcagaggatactgcagtgtactattgtgctcatcttccttattccggttcttactgggcattcgattattgggggcaagggacacaagttaccgtgtctagcgagcccaaatctagcgacaaaactcacacatgtccaccgtgcccagcacctgaagcagcagggggaccgtcagtcttcctcttccccccaaaacccaaggacaccctcatgatctcccggacccctgaggtcacatgcgtggtggtgagcgtgagccacgaagaccctgaggtcaagttcaactggtacgtggacggcgtggaggtgcataatgccaagacaaagccgcgggaggagcagtacaacagcacgtaccgtgtggtcagcgtcctcaccgtcctgcaccaggactggctgaatggcaaggagtacaagtgcaaggtctccaacaaagccctcccagcccccatcgagaaaaccatctccaaagccaaagggcagccccgagaaccacaggtgtacgtgctgcccccatcccgggaggagatgaccaagaaccaggtcagcctgctgtgcctggtcaaaggcttctatcccagcgacatcgccgtggagtgggagagcaatgggcagccggagaacaactacctcacctggcctcccgtgctggactccgacggctccttcttcctctacagcaagctcaccgtggacaagtctagatggcagcaggggaacgtcttctcatgctccgtgatgcatgaggctctgcacaaccactacacgcagaagagcctctccctgtctccgggt

SEQ ID NO: 335 - DNA, 1362 bp, synthetic construct
  misc_feature 1..1362: note = Description of Artificial Sequence: Synthetic polynucleotide
  source 1..1362: mol_type = other DNA
caggttcaacttcaagaatccgggccaggtctggtcaagccttcagagactttgtcccttacttgcacagtgagcggtggctctatctcaagttactactggtcatggatacggcagcccccaggaaaggggcttgagtggattgggtacatttattactcagggtcaacaaactacaatccctccctcaaatcccgagtgacaattagtgtcgatacatctaaaaaccagttttccctgaaattgagctcagtcaccgcagctgatactgcagtctattattgtgctggcacaacaatcttcggggtagtaactccaaacttctactacgggatggacgtgtgggggcaaggaacaaccgtaacagtaagtagtgcctccaccaagggcccatcggtcttccccctggcaccctcctccaagagcacctctgggggcacagcggccctgggctgcctggtcaaggactacttccccgaaccggtgacggtgtcgtggaactcaggcgccctgaccagcggcgtgcacaccttcccggctgtcctacagtcctcaggactctactccctcagcagcgtggtgaccgtgccctccagcagcttgggcacccagacctacatctgcaacgtgaatcacaagcccagcaacaccaaggtggacaagaaagttgagcccaaatcttgtgacaaaactcacacatgtccaccgtgcccagcacctgaagcagcagggggaccgtcagtcttcctcttccccccaaaacccaaggacaccctcatgatctcccggacccctgaggtcacatgcgtggtggtgagcgtgagccacgaagaccctgaggtcaagttcaactggtacgtggacggcgtggaggtgcataatgccaagacaaagccgcgggaggagcagtacaacagcacgtaccgtgtggtcagcgtcctcaccgtcctgcaccaggactggctgaatggcaaggagtacaagtgcaaggtctccaacaaagccctcccagcccccatcgagaaaaccatctccaaagccaaagggcagccccgagaaccacaggtgtacgtgctgcccccatcccgggaggagatgaccaagaaccaggtcagcctgctgtgcctggtcaaaggcttctatcccagcgacatcgccgtggagtgggagagcaatgggcagccggagaacaactacctcacctggcctcccgtgctggactccgacggctccttcttcctctacagcaagctcaccgtggacaagtctagatggcagcaggggaacgtcttctcatgctccgtgatgcatgaggctctgcacaaccactacacgcagaagagcctctccctgtctccgggt

SEQ ID NO: 336 - DNA, 1344 bp, synthetic construct
  misc_feature 1..1344: note = Description of Artificial Sequence: Synthetic polynucleotide
  source 1..1344: mol_type = other DNA
caagtacaacttcaagagtctggccctgggcttgttaagccctcagagaccttgtcactgacctgtaccgtatcaggcgggtcaatttcatcttactactggagttggcttcgtcagcctgccggatctggactggagtggataggtagactgtatgtttccggctttacaaattacaacccatctttgaaaagccgtgtgactctcagcctcgacccttctcggaatcaactttcacttaaattgtcttctgttacagctgccgacactgcagtatattattgtgcaggggactcaggcaactattggggatggtttgatccttgggggcaggggaccctggtaaccgtgagttctgcctccaccaagggcccatcggtcttccccctggcaccctcctccaagagcacctctgggggcacagcggccctgggctgcctggtcaaggactacttccccgaaccggtgacggtgtcgtggaactcaggcgccctgaccagcggcgtgcacaccttcccggctgtcctacagtcctcaggactctactccctcagcagcgtggtgaccgtgccctccagcagcttgggcacccagacctacatctgcaacgtgaatcacaagcccagcaacaccaaggtggacaagaaagttgagcccaaatcttgtgacaaaactcacacatgtccaccgtgcccagcacctgaagcagcagggggaccgtcagtcttcctcttccccccaaaacccaaggacaccctcatgatctcccggacccctgaggtcacatgcgtggtggtgagcgtgagccacgaagaccctgaggtcaagttcaactggtacgtggacggcgtggaggtgcataatgccaagacaaagccgcgggaggagcagtacaacagcacgtaccgtgtggtcagcgtcctcaccgtcctgcaccaggactggctgaatggcaaggagtacaagtgcaaggtctccaacaaagccctcccagcccccatcgagaaaaccatctccaaagccaaagggcagccccgagaaccacaggtgtacgtgctgcccccatcccgggaggagatgaccaagaaccaggtcagcctgctgtgcctggtcaaaggcttctatcccagcgacatcgccgtggagtgggagagcaatgggcagccggagaacaactacctcacctggcctcccgtgctggactccgacggctccttcttcctctacagcaagctcaccgtggacaagtctagatggcagcaggggaacgtcttctcatgctccgtgatgcatgaggctctgcacaaccactacacgcagaagagcctctccctgtctccgggt

SEQ ID NO: 337 - DNA, 1356 bp, synthetic construct; identical to SEQ ID NO: 333
  misc_feature 1..1356: note = Description of Artificial Sequence: Synthetic polynucleotide
  source 1..1356: mol_type = other DNA

SEQ ID NO: 338 - DNA, 1452 bp, synthetic construct
  misc_feature 1..1452: note = Description of Artificial Sequence: Synthetic polynucleotide
  source 1..1452: mol_type = other DNA
agcagcgaattgacccaaccaccttccgtcagcgtcgcaccagggcaaaccgcccgcatcacatgcggtgggaacaatataggaagcaaatctgtccactggtaccagcaaaaaccaggacaagcccctgttctggtcgtctatgatgacagcgacagaccaagtggtattcccgagagattctccggtagcaactctggaaatacagctactttgaccatctccagagttgaggctggtgacgaggcagattactattgccaggtctgggacagctccagcgaccacgtcgtattcggtggcgggaccaagctgactgtgctgggcggctccgagggcaagagcagcggcagcggcagcgagagcaagagcaccggcggcagccaggtgcagttggtagagtcaggagggggcctcgttcaacctggtggcagcctccgtttgtcttgtgctgccagtggatttactttcagtcactacgcaatgagctgggtgagacaagcacctggcaagggccttgagtgggtctccactatcggcggttcaggggggagcacttactacgctgactctgtaaaaggtcgctttactatatctagagataactctaaaaacacactctacttgcagatgaacagcctgcgagccgaagatacagccgtgtactactgcgccaagcctcatattgtaatggtcactgccctcttgtatgatggcatggatgtttggggccaagggacaatggtgacagtctcaagcgagcccaaatctagcgacaaaactcacacatgtccaccgtgcccagcacctgaagcagcagggggaccgtcagtcttcctcttccccccaaaacccaaggacaccctcatgatctcccggacccctgaggtcacatgcgtggtggtgagcgtgagccacgaagaccctgaggtcaagttcaactggtacgtggacggcgtggaggtgcataatgccaagacaaagccgcgggaggagcagtacaacagcacgtaccgtgtggtcagcgtcctcaccgtcctgcaccaggactggctgaatggcaaggagtacaagtgcaaggtctccaacaaagccctcccagcccccatcgagaaaaccatctccaaagccaaagggcagccccgagaaccacaggtgtacgtgctgcccccatcccgggaggagatgaccaagaaccaggtcagcctgctgtgcctggtcaaaggcttctatcccagcgacatcgccgtggagtgggagagcaatgggcagccggagaacaactacctcacctggcctcccgtgctggactccgacggctccttcttcctctacagcaagctcaccgtggacaagtctagatggcagcaggggaacgtcttctcatgctccgtgatgcatgaggctctgcacaaccactacacgcagaagagcctctccctgtctccgggt

SEQ ID NO: 339 - DNA, 1365 bp, synthetic construct
  misc_feature 1..1365: note = Description of Artificial Sequence: Synthetic polynucleotide
  source 1..1365: mol_type = other DNA
caggttcagctgcaagagtctggccctggcctggtcaagccttccgagacactgtctctgacctgcaccgtgtctggcggctccatctcctcctactactggtcctggatcagacagcctcctggcaaaggcctggaatggatcggctacatctactactccggctccaccaactacaaccccagcctgaagtccagagtgaccatctccgtggacacctccaagaaccagttctccctgaagctgtcctccgtgaccgctgctgataccgccgtgtactattgtgctggcaccaccatcttcggcgtggtcacccctaacttctactacggcatggacgtgtggggccaaggcacaacagtgacagtctcttctgcctccaccaagggtccatcggtcttccccctggcaccctcctccaagagcacctctgggggcacagcggccctgggctgcctggtcaaggactacttccccgaaccggtgacggtgtcgtggaactcaggcgccctgaccagcggcgtgcacaccttcccggctgtcctacagtcctcaggactctactccctcagcagcgtggtgaccgtgccctccagcagcttgggcacccagacctacatctgcaacgtgaatcacaagcccagcaacaccaaggtggacaagaaagttgagcccaaatcttgtgacaaaactcacacttgtccaccgtgcccagcacctgaagcagcagggggaccgtcagtcttcctcttccccccaaaacccaaggacaccctcatgatctcccggacccctgaggtcacatgcgtggtggtgagcgtgagccacgaagaccctgaggtcaagttcaactggtacgtggacggcgtggaggtgcataatgccaagacaaagccgcgggaggagcagtacaacagcacgtaccgtgtggtcagcgtcctcaccgtcctgcaccaggactggctgaatggcaaggagtacaagtgcaaggtgtccaacaaagccctcccagcccccatcgagaaaaccatctccaaagccaaagggcagccccgagaaccacaggtgtacgtgctgcccccatcccgggaggagatgaccaagaaccaggtcagcctgctgtgcctggtcaaaggcttctatcccagcgacatcgccgtggagtgggagagcaatgggcagccggagaacaactacctcacctggcctcccgtgctggactccgacggctccttcttcctctacagcaagctcaccgtggacaagtccagatggcagcaggggaacgtcttctcatgctccgtgatgcatgaggctctgcacaaccactacacgcagaagtctctctccctgtctccgggaaaa

SEQ ID NO: 340 - protein, 7 aa, synthetic construct
  REGION 1..7: note = Description of Artificial Sequence: Synthetic peptide
NNNAAWS

SEQ ID NO: 341 - protein, 18 aa, synthetic construct
  REGION 1..18: note = Description of Artificial Sequence: Synthetic peptide
RTYYRSKWLYDYAYSYKS

SEQ ID NO: 342 - protein, 8 aa, synthetic construct
  REGION 1..8: note = Description of Artificial Sequence: Synthetic peptide
GYSSSFDY

SEQ ID NO: 343 - protein, 14 aa, synthetic construct
  REGION 1..14: note = Description of Artificial Sequence: Synthetic peptide
TGTSSNIGTYKFVS

SEQ ID NO: 344 - protein, 7 aa, synthetic construct
  REGION 1..7: note = Description of Artificial Sequence: Synthetic peptide
EVSKRPS

SEQ ID NO: 345 - protein, 10 aa, synthetic construct
  REGION 1..10: note = Description of Artificial Sequence: Synthetic peptide
VSYAGSGTLL

SEQ ID NO: 346 - protein, 120 aa, synthetic construct
  REGION 1..120: note = Description of Artificial Sequence: Synthetic polypeptide
QVQLQQSGPRLVRPSQTLSLTCAISGDSVFNNNAAWSWIRQSPSRGLEWLGRTYYRSKWLYDYAVSVKSRITVNPDTSRNQFTLQLNSVTPEDTALYYCARGYSSSFDYWGQGTLVTVSS

SEQ ID NO: 347 - protein, 110 aa, synthetic construct
  REGION 1..110: note = Description of Artificial Sequence: Synthetic polypeptide
QSALTQPASVSGSPGQSITISCTGTSSNIGTYKFVSWYQQHPDKAPKVLLYEVSKRPSGVSSRFSGSKSGNTASLTISGLQAEDQADYHCVSYAGSGTLLFGGGTKLTVL

SEQ ID NO: 348 - protein, 243 aa, synthetic construct; identical to SEQ ID NO: 68
  REGION 1..243: note = Description of Artificial Sequence: Synthetic polypeptide

SEQ ID NO: 349 - protein, 449 aa, synthetic construct
  REGION 1..449: note = Description of Artificial Sequence: Synthetic polypeptide
QVQLQQSGPRLVRPSQTLSLTCAISGDSVFNNNAAWSWIRQSPSRGLEWLGRTYYRSKWLYDYAVSVKSRITVNPDTSRNQFTLQLNSVTPEDTALYYCARGYSSSFDYWGQGTLVTVSSASTKGPSVFPLAPSSKSTSGGTAALGCLVKDYFPEPVTVSWNSGALTSGVHTFPAVLQSSGLYSLSSVVTVPSSSLGTQTYICNVNHKPSNTKVDKKVEPKSCDKTHTCPPCPAPEAAGGPSVFLFPPKPKDTLMISRTPEVTCVVVSVSHEDPEVKFNWYVDGVEVHNAKTKPREEQYNSTYRVVSVLTVLHQDWLNGKEYKCKVSNKALPAPIEKTISKAKGQPREPQVYVYPPSREEMTKNQVSLTCLVKGFYPSDIAVEWESNGQPENNYKTTPPVLDSDGSFALVSKLTVDKSRWQQGNVFSCSVMHEALHNHYTQKSLSLSPG

SEQ ID NO: 350 - protein, 216 aa, synthetic construct
  REGION 1..216: note = Description of Artificial Sequence: Synthetic polypeptide
QSALTQPASVSGSPGQSITISCTGTSSNIGTYKFVSWYQQHPDKAPKVLLYEVSKRPSGVSSRFSGSKSGNTASLTISGLQAEDQADYHCVSYAGSGTLLFGGGTKLTVLGQPKAAPSVTLFPPSSEELQANKATLVCLISDFYPGAVTVAWKADSSPVKAGVETTTPSKQSNNKYAASSYLSLTPEQWKSHRSYSCQVTHEGSTVEKTVAPTECS

SEQ ID NO: 351 - DNA, 1347 bp, synthetic construct
  misc_feature 1..1347: note = Description of Artificial Sequence: Synthetic polynucleotide
  source 1..1347: mol_type = other DNA
caggtgcagctccaacagagtggtcccagactcgtgagaccctctcaaacactcagtttgacttgtgccatctcaggcgattcagttttcaacaacaatgcagcttggagctggattaggcagtcacctagtcgcggtcttgaatggcttgggcgtacatactatcgctctaaatggttgtatgattacgctgtgtccgtgaagagccgaatcaccgtaaaccctgatacctccaggaatcagttcacattgcaactgaatagtgtgactcccgaggatactgcactctattattgtgcccgaggatatagcagtagcttcgactattggggacaagggacactcgttaccgttagttcagcctccaccaagggcccatcggtcttccccctggcaccctcctccaagagcacctctgggggcacagcggccctgggctgcctggtcaaggactacttccccgaaccggtgacggtgtcgtggaactcaggcgccctgaccagcggcgtgcacaccttcccggctgtcctacagtcctcaggactctactccctcagcagcgtggtgaccgtgccctccagcagcttgggcacccagacctacatctgcaacgtgaatcacaagcccagcaacaccaaggtggacaagaaagttgagcccaaatcttgtgacaaaactcacacatgtccaccgtgcccagcacctgaagcagcagggggaccgtcagtcttcctcttccccccaaaacccaaggacaccctcatgatctcccggacccctgaggtcacatgcgtggtggtgagcgtgagccacgaagaccctgaggtcaagttcaactggtacgtggacggcgtggaggtgcataatgccaagacaaagccgcgggaggagcagtacaacagcacgtaccgtgtggtcagcgtcctcaccgtcctgcaccaggactggctgaatggcaaggagtacaagtgcaaggtctccaacaaagccctcccagcccccatcgagaaaaccatctccaaagccaaagggcagccccgagaaccacaggtgtacgtgtaccccccatcccgggaggagatgaccaagaaccaggtcagcctgacctgcctggtcaaaggcttctatcccagcgacatcgccgtggagtgggagagcaatgggcagccggagaacaactacaagaccacgcctcccgtgctggactccgacggctccttcgccctcgtgagcaagctcaccgtggacaagtctagatggcagcaggggaacgtcttctcatgctccgtgatgcatgaggctctgcacaaccactacacgcagaagagcctctccctgtctccgggt

SEQ ID NO: 352 - DNA, 648 bp, synthetic construct
  misc_feature 1..648: note = Description of Artificial Sequence: Synthetic polynucleotide
  source 1..648: mol_type = other DNA
cagtctgctctgacccagcctgcctccgtgtctggctctcccggccagtccatcaccatcagctgtaccggcacctcctccaacatcggcacctacaagttcgtgtcctggtatcagcagcaccccgacaaggcccccaaagtgctgctgtacgaggtgtccaagcggccctctggcgtgtcctccagattctccggctccaagtctggcaacaccgcctccctgaccatcagcggactgcaggctgaggaccaggccgactaccactgtgtgtcctacgctggctctggcaccctgctgtttggcggaggcaccaagctgaccgtgctgggtcagcccaaggctgcacccagtgtcactctgttcccgccctcctctgaggagcttcaagccaacaaggccacactggtgtgtctcataagtgacttctacccgggagccgtgacagtggcctggaaggccgatagcagccccgtcaaggcgggagtggagaccaccacaccctccaaacaaagcaacaacaagtacgcggccagcagctatctgagcctgacgcctgagcagtggaagtcccacagaagctacagctgccaggtcacgcatgaagggagcaccgtggagaagacagtggcccctacagaatgttca

SEQ ID NO: 353 - DNA, 1422 bp, synthetic construct
  misc_feature 1..1422: note = Description of Artificial Sequence: Synthetic polynucleotide
  source 1..1422: mol_type = other DNA
gacatacaaatgacacaatcaccctcttctctttctgcaagcgttggcgaccgtgtcactatcacttgtcgagcccgccagtccataggtactgccattcactggtatcaacagaagcctggcaaggctcccaaactcctgattaagtatgccagcgagagcatttccggcgtaccttcaagattttccggctccggtagtgggacagatttcactctcactatatctagcctccaaccagaagatttcgccacttactactgtcaacaatcaggttcatggccttacactttcggccaggggacaaaattggagatcaagggcggctccgagggcaagagcagcggcagcggcagcgagagcaagagcaccggcggcagcgaggtgcaactggtggagtctgggggaggcctggtcaagcctggggggtccctgagactctcctgtgcagcctctggattcaccttcagtagatataacatgaactgggtccgccaggctccagggaaggggctggagtgggtctcatccattagtactagtagtaattacatatactacgcagactcagtgaagggccgattcaccttctccagagacaacgccaagaactcactggatctgcaaatgagcggcctgagagccgaggacacggctatttattactgtacgagaggctgggggccttttgactactggggccagggaaccctggtcaccgtctcctcagagcccaaatctagcgacaaaactcacacatgtccaccgtgcccagcacctgaagcagcagggggaccgtcagtcttcctcttccccccaaaacccaaggacaccctcatgatctcccggacccctgaggtcacatgcgtggtggtgagcgtgagccacgaagaccctgaggtcaagttcaactggtacgtggacggcgtggaggtgcataatgccaagacaaagccgcgggaggagcagtacaacagcacgtaccgtgtggtcagcgtcctcaccgtcctgcaccaggactggctgaatggcaaggagtacaagtgcaaggtctccaacaaagccctcccagcccccatcgagaaaaccatctccaaagccaaagggcagccccgagaaccacaggtgtacgtgtaccccccatcccgggaggagatgaccaagaaccaggtcagcctgacctgcctggtcaaaggcttctatcccagcgacatcgccgtggagtgggagagcaatgggcagccggagaacaactacaagaccacgcctcccgtgctggactccgacggctccttcgccctcgtgagcaagctcaccgtggacaagtctagatggcagcaggggaacgtcttctcatgctccgtgatgcatgaggctctgcacaaccactacacgcagaagagcctctccctgtctccgggt

SEQ ID NO: 354 - DNA, 1425 bp, synthetic construct
  misc_feature 1..1425: note = Description of Artificial Sequence: Synthetic polynucleotide
  source 1..1425: mol_type = other DNA
gacatccagatgacccagtctccatcctctctgtccgcctctgtgggcgacagagtgaccattacctgccgggccagacagtctatcggcaccgctatccactggtatcagcagaagcctggcaaggcccctaagctgctgattaagtacgcctccgagtccatctccggcgtgccctccagattttctggctctggatctggcaccgactttaccctgacaatctccagcctgcagcctgaggacttcgccacctactactgtcagcagtccggctcttggccttacacctttggtcagggcaccaagctggaaatcaagggcggatctgagggaaagtccagcggctccggcagcgaaagcaagtccaccggcggaagcgaggtgcagctggttgaatctggcggaggactggttaagcctggcggctctctgagactgtcttgtgctgcttctggcttcaccttcagccggtacaacatgaactgggtccgacaggctcctggcaaaggcctggaatgggtgtcctccatctccacctccagcaactacatctactacgccgactccgtgaagggcagattcaccttctccagagacaacgccaagaactccctggacctgcagatgtctggcctgagagctgaggacaccgctatctactactgcaccagaggctggggacccttcgattattggggccagggaaccctggtcaccgtgtcatctgagcccaaatctagcgacaaaactcacacttgtccaccgtgcccagcacctgaagcagcagggggaccgtcagtcttcctcttccccccaaaacccaaggacaccctcatgatctcccggacccctgaggtcacatgcgtggtggtgagcgtgagccacgaagaccctgaggtcaagttcaactggtacgtggacggcgtggaggtgcataatgccaagacaaagccgcgggaggagcagtacaacagcacgtaccgtgtggtcagcgtcctcaccgtcctgcaccaggactggctgaatggcaaggagtacaagtgcaaggtgtccaacaaagccctcccagcccccatcgagaaaaccatctccaaagccaaagggcagccccgagaaccacaggtgtacgtgtaccccccatcccgggaggagatgaccaagaaccaggtcagcctgacctgcctggtcaaaggcttctatcccagcgacatcgccgtggagtgggagagcaatgggcagccggagaacaactacaagaccacgcctcccgtgctggactccgacggctccttcgccctcgtgagcaagctcaccgtggacaagtccagatggcagcaggggaacgtcttctcatgctccgtgatgcatgaggctctgcacaaccactacacgcagaagtctctctccctgtctccgggaaaa

SEQ ID NO: 355 - protein, 240 aa, synthetic construct
  REGION 1..240: note = Description of Artificial Sequence: Synthetic polypeptide
VPLIEGRIVGGWECEKHSQPWQVAVYSHGWAHCGGVLVHPQWVLTAAHCLKKNSQVWLGRHNLFEPEDTGQRVPVSHSFPHPLYNMSLLKHQSLRPDEDSSHDLMLLRLSEPAKITDVVKVLGLPTQEPALGTTCYASGWGSIEPEEFLRPRSLQCVSLHYSEKVTEFMLCAGLWTGGKDTCGGDSGGPLVCNGVLQGITSWGPEPCALPEKPAVYTKVVHYRKWIKDTIAANPHHHHHH

SEQ ID NO: 356 - protein, 117 aa, synthetic construct
  REGION 1..117: note = Description of Artificial Sequence: Synthetic polypeptide
  VARIANT 16: note = D or Q
  VARIANT 23: note = A or T
  VARIANT 41: note = P or F
  VARIANT 45: note = G or R
  VARIANT 49: note = I or M
  VARIANT 70: note = I or M
  VARIANT 88: note = A or P
  VARIANT 89: note = V or A
QVQLQESGPGLVKPSXTLSLTCXVSGNSITSDYAWNWIRQXPGKXLEWXGYISYSGSTTYNPSLKSRVTXSRDTSKNQFSLKLSSVTXXDTAVYYCATGYYYGSGFWGQGTLVTVSS

SEQ ID NO: 357 - protein, 112 aa, synthetic construct
  REGION 1..112: note = Description of Artificial Sequence: Synthetic polypeptide
  VARIANT 1: note = D or E
  VARIANT 9: note = D or A
  VARIANT 10: note = S or T
  VARIANT 12: note = A or S
  VARIANT 13: note = V or L
  VARIANT 15: note = L or P
  VARIANT 21: note = I or L
  VARIANT 22: note = N or S
  VARIANT 24: note = R or K
  VARIANT 49: note = K or R
  VARIANT 58: note = V or R
  VARIANT 62: note = V or I
  VARIANT 64: note = A or D
  VARIANT 80: note = Q or S
  VARIANT 82: note = L or V
  VARIANT 83: note = Q or E
  VARIANT 85: note = P or A
  VARIANT 88: note = F or V
  VARIANT 89: note = A or S
  VARIANT 92: note = Y or F
  VARIANT 105: note = Q or G
  VARIANT 109: note = L or V
XIVLTQSPXXLXXSXGERATXXCXASESVEYFGTSLMHWYQQKPGQPPXLLIYAASNXESGXPXRFSGSGSGTDFTLTIXSXXQXEDXXVYXCQQTRKVPYTFGXGTKXEIK

SEQ ID NO: 358 - protein, 106 aa, synthetic construct
  REGION 1..106: note = Description of Artificial Sequence: Synthetic polypeptide
SYELTQPPSVSVSPGETASITCSGDQLGENYASWYQQKPGQSPVLVIYQDSKRPSGIPERFSGSNSGNTATLTISGTQALDEADYYCQAWDNSIVVFGGGTKLTVL

SEQ ID NO: 359 - protein, 212 aa, synthetic construct
  REGION 1..212: note = Description of Artificial Sequence: Synthetic polypeptide
SYELTQPPSVSVSPGETASITCSGDQLGENYASWYQQKPGQSPVLVIYQDSKRPSGIPERFSGSNSGNTATLTISGTQALDEADYYCQAWDNSIVVFGGGTKLTVLGQPKAAPSVTLFPPSSEELQANKATLVCLISDFYPGAVTVAWKADSSPVKAGVETTTPSKQSNNKYAASSYLSLTPEQWKSHRSYSCQVTHEGSTVEKTVAPTECS

SEQ ID NO: 360 - DNA, 636 bp, synthetic construct
  misc_feature 1..636: note = Description of Artificial Sequence: Synthetic polynucleotide
  source 1..636: mol_type = other DNA
agttatgagctgactcaaccacccagtgtcagcgtatccccaggagaaactgcctctataacatgcagcggagaccagttgggagaaaattacgcctcctggtaccaacagaagcctggacaaagtcctgtcctcgttatttatcaagattctaaacgtccctctgggatccccgaacgattctccggctctaactctgggaataccgctaccttgacaataagtggtacacaggcacttgatgaagctgattattactgccaggcatgggataacagcattgtggttttcgggggcggcaccaaactcacagttctcggtcagcccaaggctgcacccagtgtcactctgttcccgccctcctctgaggagcttcaagccaacaaggccacactggtgtgtctcataagtgacttctacccgggagccgtgacagtggcctggaaggccgatagcagccccgtcaaggcgggagtggagaccaccacaccctccaaacaaagcaacaacaagtacgcggccagcagctatctgagcctgacgcctgagcagtggaagtcccacagaagctacagctgccaggtcacgcatgaagggagcaccgtggagaagacagtggcccctacagaatgttca

SEQ ID NO: 361 - DNA, 357 bp, synthetic construct; identical to SEQ ID NO: 233
  misc_feature 1..357: note = Description of Artificial Sequence: Synthetic polynucleotide
  source 1..357: mol_type = other DNA

SEQ ID NO: 362 - DNA, 363 bp, synthetic construct
  misc_feature 1..363: note = Description of Artificial Sequence: Synthetic polynucleotide
  source 1..363: mol_type = other DNA
caggtgcagctggtggagtctgggggaggcgtggtccagcctgggaggtccctgagactctcctgtgcagcctctggattcaccttcagttactatggcatgcactgggtccgccaggctccaggcaaggggctggagtgggtggcatttatatcatatgatggaagtaataaatactatgcagactccgtgaagggccgattcaccatctccagagacaattccaagaacacgctgtatctgcaaatgaacagcctgagagctgaggacacggctgtgtattactgtgcccacctcccttatagtgggagctactgggcctttgactactggggccagggaacccaggtcaccgtctcttca

SEQ ID NO: 363 - protein, 107 aa, synthetic construct [sequence omitted]

SEQ ID NO: 364 - protein, 106 aa, synthetic construct
  REGION 1..106: note = Description of Artificial Sequence: Synthetic polypeptide
GQPKAAPSVTLFPPSSEELQANKATLVCLISDFYPGAVTVAWKADSSPVKAGVETTTPSKQSNNKYAASSYLSLTPEQWKSHRSYSCQVTHEGSTVEKTVAPTECS

SEQ ID NO: 365 - protein, 252 aa, synthetic construct
  REGION 1..252: note = Description of Artificial Sequence: Synthetic polypeptide
QVQLQESGPGLVKPSETLSLTCTVSGGSISSYYWSWIRQPPGKGLEWIGYIYYSGSTNYNPSLKSRVTISVDTSKNQFSLKLSSVTAADTAVYYCAGTTIFGVVTPNFYYGMDVWGQGTTVTVSSGGSEGKSSGSGSESKSTGGSDIQMTQSPSFLSASVGDRVTITCRASQGISSYLAWYQQKPGKAPKFLIYAASTLQSGVPSRFSGSGSGTEFTLTISSLQPEDFATYYCQQLNSYPLTFGGGTKVEIK

SEQ ID NO: 366 - protein, 252 aa, synthetic construct
  REGION 1..252: note = Description of Artificial Sequence: Synthetic polypeptide
DIQMTQSPSFLSASVGDRVTITCRASQGISSYLAWYQQKPGKAPKFLIYAASTLQSGVPSRFSGSGSGTEFTLTISSLQPEDFATYYCQQLNSYPLTFGGGTKVEIKGGSEGKSSGSGSESKSTGGSQVQLQESGPGLVKPSETLSLTCTVSGGSISSYYWSWIRQPPGKGLEWIGYIYYSGSTNYNPSLKSRVTISVDTSKNQFSLKLSSVTAADTAVYYCAGTTIFGVVTPNFYYGMDVWGQGTTVTVSS

SEQ ID NO: 367 - protein, 250 aa, synthetic construct
  REGION 1..250: note = Description of Artificial Sequence: Synthetic polypeptide
EVQLVESGGGVVQPGRSLRLSCVASGFTFSSYDIHWVRQAPGKGLEWVAIISYDGSKKDYTDSVKGRFTISRDNSKNTLYLQMDSLRVEDSAVYSCARESGWSHYYYYGMDVWGQGTMVTVSSGGSEGKSSGSGSESKSTGGSDIVMTQSPSSLSASVGDRVTITCRASQDISNYLAWYQQKPGKVPKFLIYAASTLHSGVPSRFSGSGSGTDFTLTISSLQPEDVATYYCQKYNSAPYTFGQGTRLEIK

SEQ ID NO: 368 - protein, 250 aa, synthetic construct
  REGION 1..250: note = Description of Artificial Sequence: Synthetic polypeptide
DIVMTQSPSSLSASVGDRVTITCRASQDISNYLAWYQQKPGKVPKFLIYAASTLHSGVPSRFSGSGSGTDFTLTISSLQPEDVATYYCQKYNSAPYTFGQGTRLEIKGGSEGKSSGSGSESKSTGGSEVQLVESGGGVVQPGRSLRLSCVASGFTFSSYDIHWVRQAPGKGLEWVAIISYDGSKKDYTDSVKGRFTISRDNSKNTLYLQMDSLRVEDSAVYSCARESGWSHYYYYGMDVWGQGTMVTVSS

SEQ ID NO: 369 - protein, 245 aa, synthetic construct
  REGION 1..245: note = Description of Artificial Sequence: Synthetic polypeptide
QVQLQESGPGLVKPSETLSLTCTVSGGSISSYYWSWLRQPAGSGLEWIGRLYVSGFTNYNPSLKSRVTLSLDPSRNQLSLKLSSVTAADTAVYYCAGDSGNYWGWFDPWGQGTLVTVSSGGSEGKSSGSGSESKSTGGSSYELTQPPSVSVSPGETASITCSGDQLGENYACWYQQKPGQSPVLVIYQDSKRPSGIPERFSGSNSGNTATLTISGTQALDEADYYCQAWDNSIVVFGGGTKLTVL

SEQ ID NO: 370 - protein, 245 aa, synthetic construct
  REGION 1..245: note = Description of Artificial Sequence: Synthetic polypeptide
SYELTQPPSVSVSPGETASITCSGDQLGENYACWYQQKPGQSPVLVIYQDSKRPSGIPERFSGSNSGNTATLTISGTQALDEADYYCQAWDNSIVVFGGGTKLTVLGGSEGKSSGSGSESKSTGGSQVQLQESGPGLVKPSETLSLTCTVSGGSISSYYWSWLRQPAGSGLEWIGRLYVSGFTNYNPSLKSRVTLSLDPSRNQLSLKLSSVTAADTAVYYCAGDSGNYWGWFDPWGQGTLVTVSS

SEQ ID NO: 371 - protein, 419 aa, synthetic construct
  REGION 1..419: note = Description of Artificial Sequence: Synthetic polypeptide
MIQRTPKIQVYSRHPAENGKSNFLNCYVSGFHPSDIEVDLLKNGERIEKVEHSDLSFSKDWSFYLLYYTEFTPTEKDEYACRVNHVTLSQPKIVKWDRDMGGGGSGGGGSGGGGSGSHSMRYFSAAVSRPGRGEPRFIAMGYVDDTQFVRFDSDSASPRMEPRAPWVEQEGPEYWEEETRNTKAHAQTDRMNLQTLRGYYNQSEASSHTLQWMIGCDLGSDGRLLRGYEQYAYDGKDYLALNEDLRSWTAADTAAQISKRKCEAANVAEQRRAYLEGTCVEWLHRYLENGKEMLQRADPPKTHVTHHPVFDYEATLRCWALGFYPAEIILTWQRDGEDQTQDVELVETRPAGDGTFQKWAAVVVPSGEEQRYTCHVQHEGLPEPLMLRWKQSSLPTIPIGGGGSGLNDIFEAQKIEWHE

SEQ ID NO: 372 - protein, 456 aa, synthetic construct
  REGION 1..456: note = Description of Artificial Sequence: Synthetic polypeptide
RIIPRHLQLGGGGSGGGGSIQRTPKIQVYSRHPAENGKSNFLNCYVSGFHPSDIEVDLLKNGERIEKVEHSDLSFSKDWSFYLLYYTEFTPTEKDEYACRVNHVTLSQPKIVKWDRDMGGGGSGGGGSGGGGSGSHSMRYFSAAVSRPGRGEPRFIAMGYVDDTQFVRFDSDSASPRMEPRAPWVEQEGPEYWEEETRNTKAHAQTDRMNLQTLRGYYNQSEASSHTLQWMIGCDLGSDGRLLRGYEQYAYDGKDYLALNEDLRSWTAADTAAQISKRKCEAANVAEQRRAYLEGTCVEWLHRYLENGKEMLQRADPPKTHVTHHPVFDYEATLRCWALGFYPAEIILTWQRDGEDQTQDVELVETRPAGDGTFQKWAAVVVPSGEEQRYTCHVQHEGLPEPLMLRWSKEGDGGIMSVRESRSLSEDLGGGGSHHHHHHGSGLNDIFEAQKIEWHE

SEQ ID NO: 373 - protein, 314 aa, synthetic construct
  REGION 1..314: note = Description of Artificial Sequence: Synthetic polypeptide
GSHSMRYFSAAVSRPGRGEPRFIAMGYVDDTQFVRFDSDSACPRMEPRAPWVEQEGPEYWEEETRNTKAHAQTDRMNLQTLRGYYNQSEASSHTLQWMIGCDLGSDGRLLRGYEQYAYDGKDYLALNEDLRSWTAADTAAQISKRKCEAANVAEQRRAYLEGTCVEWLHRYLENGKEMLQRADPPKTHVTHHPVFDYEATLRCWALGFYPAEIILTWQRDGEDQTQDVELVETRPAGDGTFQKWAAVVVPSGEEQRYTCHVQHEGLPEPLMLRWKQSSLPTIPIMGIVAGLVVLAAVVTGAAVAAVLWRKKSSD

SEQ ID NO: 374 - DNA, 1359 bp, synthetic construct
  misc_feature 1..1359: note = Description of Artificial Sequence: Synthetic polynucleotide
  source 1..1359: mol_type = other DNA
atggcttgggtgtggacattgttgtttctgatggctgctgctcaatctattcaagctaggatcattcctagacatctgcaactcggaggcggaggcagcggaggaggaggatctggaggaggaggatctattcagaggacacctaagattcaagtgtactctagacatcctgctgagaacggcaagagcaactttctgaactgctatgtgagcggctttcatcctagcgatattgaagtggatctgctgaaaaacggcgaacgtattgaaaaagtggaacatagcgatctgagctttagcaaagattggagcttttatctgctgtattataccgaatttacccctaccgaaaaagatgaatatgcctgcagagtgaaccatgtgaccctgagccagcctaagattgtgaaatgggatagagatatgggaggaggaggctctggaggaggaggatctggaggcggaggcagcggctctcatagcatgagatattttagcgctgcagtgagccgtcctggacgtggagaacctaggtttattgctatgggctatgtggatgatacccagtttgtgaggtttgatagcgatagcgcctctcctaggatggaacctagagctccctgggtggaacaggaaggcccagaatattgggaagaagaaaccaggaacaccaaagcacatgctcagaccgatcgtatgaacctgcagaccctgagaggctattataaccagagcgaagcatctagccataccctgcagtggatgattggctgcgatctgggcagcgatggcagactgctgagaggctatgaacagtatgcatatgatggcaaagattatctggcactgaacgaagatctgaggagctggaccgctgctgataccgctgctcagattagcaagaggaagtgcgaagctgctaacgtggctgaacagagacgcgcatatctggaaggcacctgcgtggaatggctgcataggtatctggaaaacggcaaagaaatgctgcagagagctgatcctcctaaaacccatgtgacccatcatcctgtgtttgattatgaagctaccctgaggtgctgggctctgggcttctatcctgctgagattattctgacctggcagagagatggagaagatcagactcaagatgtcgagttggtcgagactagacctgctggagatggcacctttcagaagtgggcagctgttgtcgtgcctagcggagaagaacagagatatacctgccatgtgcagcatgaaggcctgcctgaacctctgatgctgaggtggaaacagagcagcttgcctactattcctattggaggaggaggatctcaccatcatcatcatcactga

SEQ ID NO: 375 - protein, 435 aa, synthetic construct
  REGION 1..435: note = Description of Artificial Sequence: Synthetic polypeptide
QARIIPRHLQLGGGGSGGGGSGGGGSIQRTPKIQVYSRHPAENGKSNFLNCYVSGFHPSDIEVDLLKNGERIEKVEHSDLSFSKDWSFYLLYYTEFTPTEKDEYACRVNHVTLSQPKIVKWDRDMGGGGSGGGGSGGGGSGSHSMRYFSAAVSRPGRGEPRFIAMGYVDDTQFVRFDSDSASPRMEPRAPWVEQEGPEYWEEETRNTKAHAQTDRMNLQTLRGYYNQSEASSHTLQWMIGCDLGSDGRLLRGYEQYAYDGKDYLALNEDLRSWTAADTAAQISKRKCEAANVAEQRRAYLEGTCVEWLHRYLENGKEMLQRADPPKTHVTHHPVFDYEATLRCWALGFYPAEIILTWQRDGEDQTQDVELVETRPAGDGTFQKWAAVVVPSGEEQRYTCHVQHEGLPEPLMLRWKQSSLPTIPIGGGGSHHHHHH

SEQ ID NO: 376 - DNA, 1359 bp, synthetic construct; identical to SEQ ID NO: 374
  misc_feature 1..1359: note = Description of Artificial Sequence: Synthetic polynucleotide
  source 1..1359: mol_type = other DNA

SEQ ID NO: 377 - protein, 433 aa, synthetic construct
  REGION 1..433: note = Description of Artificial Sequence: Synthetic polypeptide
RIIPRHLQLGGGGSGGGGSGGGGSIQRTPKIQVYSRHPAENGKSNFLNCYVSGFHPSDIEVDLLKNGERIEKVEHSDLSFSKDWSFYLLYYTEFTPTEKDEYACRVNHVTLSQPKIVKWDRDMGGGGSGGGGSGGGGSGSHSMRYFSAAVSRPGRGEPRFIAMGYVDDTQFVRFDSDSASPRMEPRAPWVEQEGPEYWEEETRNTKAHAQTDRMNLQTLRGYYNQSEASSHTLQWMIGCDLGSDGRLLRGYEQYAYDGKDYLALNEDLRSWTAADTAAQISKRKCEAANVAEQRRAYLEGTCVEWLHRYLENGKEMLQRADPPKTHVTHHPVFDYEATLRCWALGFYPAEIILTWQRDGEDQTQDVELVETRPAGDGTFQKWAAVVVPSGEEQRYTCHVQHEGLPEPLMLRWKQSSLPTIPIGGGGSHHHHHH

SEQ ID NO: 378 - protein, 312 aa, synthetic construct
  REGION 1..312: note = Description of Artificial Sequence: Synthetic polypeptide
GSHSMRYFYTAVSRPGRGQPRFIAVGYVDDTQFVRFDSDAESPRMEPRAPWVEQEGPEYWDRETQNMKTATQTYQANLRTLLRYYNQSEAGSHTFQKMYGCDLGPDGRLLRGYEQFAYDGRDYIILNEDLRSWTAADMAAQNTQRKWEAAGAAEQHRTYLEGECLEWLRRYLENGKETLQRADPPKTNVTHHPVSDYEATLRCWALGFYPAEITLTWQRDGEEQTEDTELVETRPTGDGTFQKWAAVVVPSGEEQRYTCHVQHEGLPKPLTLRWEPSSQSTILIGGGGSHHHHHHGSGLNDIFEAQKIEWHE

SEQ ID NO: 379 - protein, 99 aa, synthetic construct
  REGION 1..99: note = Description of Artificial Sequence: Synthetic polypeptide
IQRTPKIQVYSRHPPENGKPNFLNCYVSGFHPSDIEVDLLKNGEKMGKVEHSDLSFSKDWSFYLLYYTEFTPNEKDEYACRVNHVTLSGPRTVKWDRDM

SEQ ID NO: 380 - protein, 125 aa, synthetic construct
  REGION 1..125: note = Description of Artificial Sequence: Synthetic polypeptide
QVQLQQSGPGLVKPSQTLSLTCAISGDSVSSNSAAWNWIRQSPSRGLEWLGRTYYRSKWYNDYAVSVKSRITINPDTSKNQISLQLNSVTPEDTAVYYCAGDRRYGIVGLPFAYWGQGTLVTVSS

SEQ ID NO: 381 - protein, 113 aa, synthetic construct
  REGION 1..113: note = Description of Artificial Sequence: Synthetic polypeptide
DIVMTQSPDSLAVSLGERATINCKSSQSVLHSSNNKNYLTWFQQKPGQPPKLLIYWASTRESGVPDRFSGSGSGTDFTLTISSLQAEDVAVYYCHQYYSTPPTFGQGTKVEIK

SEQ ID NO: 382 - protein, 122 aa, synthetic construct
  REGION 1..122: note = Description of Artificial Sequence: Synthetic polypeptide
QVQLQQSGPGLVKPSQTLSLTCAISGDSVSNNSAAWNWIRQSPSRGLEWLGRTYYRSKWYNDYAVSVKSRITINPDTSKNQFSLQLNSVTPEDTAVYYCARYGSGTLLFDYWGQGTLVTVSS

SEQ ID NO: 383 - protein, 114 aa, synthetic construct
  REGION 1..114: note = Description of Artificial Sequence: Synthetic polypeptide
DIVMTQSPDSLAVSLGERATINCKSSQSVLYSSKNKNYLAWYQQKPGQPPKLLIYWASTRESGVPDRFSGSGSGTDFTLTISSLQAEDVAVYYCQQYYSTFPYTFGQGTKLEIK

SEQ ID NO: 384 - protein, 125 aa, synthetic construct
  REGION 1..125: note = Description of Artificial Sequence: Synthetic polypeptide
QVQLQQSGPGLVRPSQTLSVTCAISGDSVSSNSASWNWIRQSPSRGLEWLGRTYYRSEWFNDYAVSVKSRVTINPDTSKNQLSLQLNSVIPEDTAVYYCAREARIGVAGKGFDYWGQGTLVTVSS

SEQ ID NO: 385 - protein, 113 aa, synthetic construct
  REGION 1..113: note = Description of Artificial Sequence: Synthetic polypeptide
DIVMTQSPDSLAVSLGERATINCKSSQSVLFRSNNKNYLAWFQQKPGQPPKLLIYWASTRESGVPDRFSGSGSGTDFTLTISSLQAEDVAVYYCQQYYSTPRTFGQGTKVEIK

SEQ ID NO: 386 - protein, 121 aa, synthetic construct
  REGION 1..121: note = Description of Artificial Sequence: Synthetic polypeptide
QVQLQQSGPGLVKPSQTLSLTCAISGDSVSSNRAAWNWIRQTPSRGLEWLGRTYYRSEWYNDYAVSVKSRITINPDTSKNQFSLQLNSVTPEDTAVYYCARVRAAVPFDYWGQGTLVTVSS

SEQ ID NO: 387 - protein, 113 aa, synthetic construct
  REGION 1..113: note = Description of Artificial Sequence: Synthetic polypeptide
DIVMTQSPDSLAVSLGERATINCKSSQSVLFSSNNKNYLAWYQQKPGQPPNLLIYWASTRESGVPDRFSGSVSGTDFTLTISSLQAEDVAIYYCQQYHSTPWTFGQGTKVEIK

SEQ ID NO: 388 - protein, 117 aa, synthetic construct
  REGION 1..117: note = Description of Artificial Sequence: Synthetic polypeptide
QLQLQESGPGLVKPSETLSLMCTVSGGSITSSSYYWGWIRQPPGKGLEWIGNIYYSGTTYYNPSLKSRVTISVDTSKNQFSLKLSSVTAADTAVYYCAAGARDFDSWGQGSLVTVSS

SEQ ID NO: 389 - protein, 115 aa, synthetic construct
  REGION 1..115: note = Description of Artificial Sequence: Synthetic polypeptide
DIVMTQSPDSLAVSLGERATINCKSSQSVLYSSSNKSYLAWYQQRPGQPPKLLIYWASTRESGVPDRFSGSGSGTDFTLTISSLQAEDVAVYYCQQYYSTPRMYTFGQGTKLEIK

SEQ ID NO: 390 - protein, 121 aa, synthetic construct
  REGION 1..121: note = Description of Artificial Sequence: Synthetic polypeptide
EVQLLESGPGLVKPSQTLSLTCVISGDSVSSNRAAWNWIRQSPSRGLEWLGRTYYRSKWYNDYAVSVKSRITINSDTSKNQISLQLNSVTPEDTAVYYCARVRPGIPFDYWGQGTPVTVSS

SEQ ID NO: 391 - protein, 113 aa, synthetic construct
  REGION 1..113: note = Description of Artificial Sequence: Synthetic polypeptide
DIVMTQSPDSLAVSLGERATINCKSSQSVLFSSNKKNYLAWYQQKPGQPPKLLIYWASTRESGVPDRFSGSGSGTDFTLTISSLQAEDVAVYYCQQYNSTPWTFGQGTKVEIK

SEQ ID NO: 392 - protein, 121 aa, synthetic construct
  REGION 1..121: note = Description of Artificial Sequence: Synthetic polypeptide
QVQLQQSGPGLVKPSQTLSLTCVISGDSVSSNRAAWNWIRQSPSRGLEWLGRTYYRSKWYNDYAVSVKSRITINSDTSKNQISLQLNSVTPEDTAVYYCARVRPGIPFDYWGQGTTVTVSS

SEQ ID NO: 393 - protein, 113 aa, synthetic construct
  REGION 1..113: note = Description of Artificial Sequence: Synthetic polypeptide
DIQMTQSPDSLAVSLGERATINCESSQSVLFSSNKKNYLAWYQQKPGQPPKLLIYWASTRESGVPDRFSGSGSGTDFTLTINRLQAEDVAVYYCQQYNSTPWTFGQGTKVEIK

SEQ ID NO: 394 - protein, 120 aa, synthetic construct
  REGION 1..120: note = Description of Artificial Sequence: Synthetic polypeptide
EVQLLESGGGLVQPGGSLRLSCAASGFTFSSYAMHWVRQAPGKGLDWVSGISGSGFSTYYVDSVKGRFTISRDNSKHTLYLQMNSLRAEDTAVYYCAKDNLVAGTVFDYWGQGTLVTVSS

SEQ ID NO: 395 - protein, 107 aa, synthetic construct
  REGION 1..107: note = Description of Artificial Sequence: Synthetic polypeptide
DIQMTQSPSTLSASVGDRVTITCRASQSISSWLAWYQQKPGKAPKLLIYKASSLESGVPSRFSGSGSGTEFTLTISSLQPDDFATYYCQQYNSYSLTFGGGTKVDIK

SEQ ID NO: 396 - protein, 120 aa, synthetic construct
  REGION 1..120: note = Description of Artificial Sequence: Synthetic polypeptide
EVQLLESGGGLVQPGGSLRLSCAASGFTFSSYAMHWVRQAPGKGLEWVSGISGSGFSTYYVDSVKGRFTISRDNSKNTLYLQMNSLRAEDTAVYYCAKDNLVAGTVFDYWGQGTLVTVSS

SEQ ID NO: 397 - protein, 107 aa, synthetic construct; identical to SEQ ID NO: 395
  REGION 1..107: note = Description of Artificial Sequence: Synthetic polypeptide

SEQ ID NO: 398 - protein, 121 aa, synthetic construct
  REGION 1..121: note = Description of Artificial Sequence: Synthetic polypeptide
QVQLQQSGPGLVKPSQTLSLTCAISGDSVSSNRAAWNWIRQSPSRGLEWLGRTYYRSKWYNDYAVSVKSRITINPDTSKNQISLQLNSVTPEDTAVYYCARVRPGIPFDYWGQGTPVTVSS

SEQ ID NO: 399 - protein, 113 aa, synthetic construct
  REGION 1..113: note = Description of Artificial Sequence: Synthetic polypeptide
DIVMTQSPDSLAVSLGERATINCKSSQSVLFSSNNKNYLAWYQQKPGQPPKLLIYWASTRESGVPDRFSGSVSGTDFTLTISSLQAEDVAVYYCQQYHSTPWTFGQGTKVEIK

SEQ ID NO: 400 - protein, 7 aa, synthetic construct
  REGION 1..7: note = Description of Artificial Sequence: Synthetic peptide
SNSAAWN

SEQ ID NO: 401 - protein, 18 aa, synthetic construct
  REGION 1..18: note = Description of Artificial Sequence: Synthetic peptide
RTYYRSKWYNDYAVSVKS

SEQ ID NO: 402 - protein, 13 aa, synthetic construct
  REGION 1..13: note = Description of Artificial Sequence: Synthetic peptide
DRRYGIVGLPFAY

SEQ ID NO: 403 - protein, 7 aa, synthetic construct
  REGION 1..7: note = Description of Artificial Sequence: Synthetic peptide
NNSAAWN

SEQ ID NO: 404 - skipped

SEQ ID NO: 405 - protein, 10 aa, synthetic construct
  REGION 1..10: note = Description of Artificial Sequence: Synthetic peptide
YGSGTLLFDY

SEQ ID NO: 406 - protein, 7 aa, synthetic construct
  REGION 1..7: note = Description of Artificial Sequence: Synthetic peptide
SNSASWN

SEQ ID NO: 407 - protein, 18 aa, synthetic construct
  REGION 1..18: note = Description of Artificial Sequence: Synthetic peptide
RTYYRSEWFNDYAVSVKS

SEQ ID NO: 408 - protein, 13 aa, synthetic construct
  REGION 1..13: note = Description of Artificial Sequence: Synthetic peptide
EARIGVAGKGFDY

SEQ ID NO: 409 - protein, 7 aa, synthetic construct
  REGION 1..7: note = Description of Artificial Sequence: Synthetic peptide
SNRAAWN

SEQ ID NO: 410 - protein, 18 aa, synthetic construct
  REGION 1..18: note = Description of Artificial Sequence: Synthetic peptide
RTYYRSEWYNDYAVSVKS

SEQ ID NO: 411 - protein, 9 aa, synthetic construct
  REGION 1..9: note = Description of Artificial Sequence: Synthetic peptide
VRAAVPFDY

SEQ ID NO: 412 - protein, 7 aa, synthetic construct
  REGION 1..7: note = Description of Artificial Sequence: Synthetic peptide
SSSYYWG

SEQ ID NO: 413 - protein, 16 aa, synthetic construct
  REGION 1..16: note = Description of Artificial Sequence: Synthetic peptide
NIYYSGTTYYNPSLKS

SEQ ID NO: 414 - protein, 7 aa, synthetic construct
  REGION 1..7: note = Description of Artificial Sequence: Synthetic peptide
GARDFDS

SEQ ID NO: 415 - protein, 9 aa, synthetic construct
  REGION 1..9: note = Description of Artificial Sequence: Synthetic peptide
VRPGIPFDY

SEQ ID NO: 416 - protein, 5 aa, synthetic construct
  REGION 1..5: note = Description of Artificial Sequence: Synthetic peptide
SYAMH

SEQ ID NO: 417 - protein, 17 aa, synthetic construct
  REGION 1..17: note = Description of Artificial Sequence: Synthetic peptide
GISGSGFSTYYVDSVKG

SEQ ID NO: 418 - protein, 11 aa, synthetic construct
  REGION 1..11: note = Description of Artificial Sequence: Synthetic peptide
DNLVAGTVFDY

SEQ ID NO: 419 - protein, 17 aa, synthetic construct
  REGION 1..17: note = Description of Artificial Sequence: Synthetic peptide
KSSQSVLHSSNNKNYLT

SEQ ID NO: 420 - protein, 7 aa, synthetic construct
  REGION 1..7: note = Description of Artificial Sequence: Synthetic peptide
WASTRES

SEQ ID NO: 421 - protein, 9 aa, synthetic construct
  REGION 1..9: note = Description of Artificial Sequence: Synthetic peptide
HQYYSTPPT

SEQ ID NO: 422 - protein, 17 aa, synthetic construct
  REGION 1..17: note = Description of Artificial Sequence: Synthetic peptide
KSSQSVLYSSKNKNYLA

SEQ ID NO: 423 - protein, 10 aa, synthetic construct
  REGION 1..10: note = Description of Artificial Sequence: Synthetic peptide
QQYYSTFPYT

SEQ ID NO: 424 - protein, 17 aa, synthetic construct
  REGION 1..17: note = Description of Artificial Sequence: Synthetic peptide
KSSQSVLFRSNNKNYLA

SEQ ID NO: 425 - protein, 9 aa, synthetic construct
  REGION 1..9: note = Description of Artificial Sequence: Synthetic peptide
QQYYSTPRT

SEQ ID NO: 426 - protein, 17 aa, synthetic construct
  REGION 1..17: note = Description of Artificial Sequence: Synthetic peptide
KSSQSVLFSSNNKNYLA

SEQ ID NO: 427 - protein, 9 aa, synthetic construct
  REGION 1..9: note = Description of Artificial Sequence: Synthetic peptide
QQYHSTPWT

SEQ ID NO: 428 - protein, 17 aa, synthetic construct
  REGION 1..17: note = Description of Artificial Sequence: Synthetic peptide
KSSQSVLYSSSNKSYLA

SEQ ID NO: 429 - protein, 11 aa, synthetic construct
  REGION 1..11: note = Description of Artificial Sequence: Synthetic peptide
QQYYSTPRMYT

SEQ ID NO: 430 - protein, 17 aa, synthetic construct
  REGION 1..17: note = Description of Artificial Sequence: Synthetic peptide
KSSQSVLFSSNKKNYLA

SEQ ID NO: 431 - protein, 9 aa, synthetic construct
  REGION 1..9: note = Description of Artificial Sequence: Synthetic peptide
QQYNSTPWT

SEQ ID NO: 432 - protein, 17 aa, synthetic construct
  REGION 1..17: note = Description of Artificial Sequence: Synthetic peptide
ESSQSVLFSSNKKNYLA

SEQ ID NO: 433 - protein, 11 aa, synthetic construct
  REGION 1..11: note = Description of Artificial Sequence: Synthetic peptide
RASQSISSWLA

SEQ ID NO: 434 - protein, 7 aa, synthetic construct
  REGION 1..7: note = Description of Artificial Sequence: Synthetic peptide
KASSLES

SEQ ID NO: 435 - protein, 9 aa, synthetic construct
  REGION 1..9: note = Description of Artificial Sequence: Synthetic peptide
QQYNSYSLT

SEQ ID NO: 436 - protein, 9 aa, synthetic construct
  REGION 1..9: note = Description of Artificial Sequence: Synthetic peptide
GDSVSSNSA

SEQ ID NO: 437 - protein, 7 aa, synthetic construct
  REGION 1..7: note = Description of Artificial Sequence: Synthetic peptide
YYRSKWY

SEQ ID NO: 438 - protein, 12 aa, synthetic construct
  REGION 1..12: note = Description of Artificial Sequence: Synthetic peptide
DRRYGIVGLPFA

SEQ ID NO: 439 - protein, 9 aa, synthetic construct
  REGION 1..9: note = Description of Artificial Sequence: Synthetic peptide
GDSVSNNSA

SEQ ID NO: 440 - protein, 9 aa, synthetic construct
  REGION 1..9: note = Description of Artificial Sequence: Synthetic peptide
YGSGTLLFD

SEQ ID NO: 441 - protein, 7 aa, synthetic construct
  REGION 1..7: note = Description of Artificial Sequence: Synthetic peptide
YYRSEWF

SEQ ID NO: 442 - protein, 12 aa, synthetic construct
  REGION 1..12: note = Description of Artificial Sequence: Synthetic peptide
EARIGVAGKGFD

SEQ ID NO: 443 - protein, 9 aa, synthetic construct
  REGION 1..9: note = Description of Artificial Sequence: Synthetic peptide
GDSVSSNRA

SEQ ID NO: 444 - protein, 7 aa, synthetic construct
  REGION 1..7: note = Description of Artificial Sequence: Synthetic peptide
YYRSEWY

SEQ ID NO: 445 - protein, 8 aa, synthetic construct
  REGION 1..8: note = Description of Artificial Sequence: Synthetic peptide
VRAAVPFD

SEQ ID NO: 446 - protein, 9 aa, synthetic construct
  REGION 1..9: note = Description of Artificial Sequence: Synthetic peptide
GGSITSSSY

SEQ ID NO: 447 - protein, 5 aa, synthetic construct
  REGION 1..5: note = Description of Artificial Sequence: Synthetic peptide
YYSGT

SEQ ID NO: 448 - protein, 6 aa, synthetic construct
  REGION 1..6: note = Description of Artificial Sequence: Synthetic peptide
GARDFD

SEQ ID NO: 449 - protein, 8 aa, synthetic construct
  REGION 1..8: note = Description of Artificial Sequence: Synthetic peptide
VRPGIPFD

SEQ ID NO: 450 - protein, 7 aa, synthetic construct
  REGION 1..7: note = Description of Artificial Sequence: Synthetic peptide
GFTFSSY

SEQ ID NO: 451 - protein, 6 aa, synthetic construct
  REGION 1..6: note = Description of Artificial Sequence: Synthetic peptide
SGSGFS

SEQ ID NO: 452 - protein, 10 aa, synthetic construct
  REGION 1..10: note = Description of Artificial Sequence: Synthetic peptide
DNLVAGTVFD

SEQ ID NO: 453 - protein, 13 aa, synthetic construct
  REGION 1..13: note = Description of Artificial Sequence: Synthetic peptide
SQSVLHSSNNKNY

SEQ ID NO: 454 - skipped

SEQ ID NO: 455 - protein, 6 aa, synthetic construct
  REGION 1..6: note = Description of Artificial Sequence: Synthetic peptide
YYSTPP

SEQ ID NO: 456 - protein, 13 aa, synthetic construct
  REGION 1..13: note = Description of Artificial Sequence: Synthetic peptide
SQSVLYSSKNKNY

SEQ ID NO: 457 - protein, 7 aa, synthetic construct
  REGION 1..7: note = Description of Artificial Sequence: Synthetic peptide
YYSTFPY

SEQ ID NO: 458 - protein, 13 aa, synthetic construct
  REGION 1..13: note = Description of Artificial Sequence: Synthetic peptide
SQSVLFRSNNKNY

SEQ ID NO: 459 - protein, 6 aa, synthetic construct
  REGION 1..6: note = Description of Artificial Sequence: Synthetic peptide
YYSTPR

SEQ ID NO: 460 - protein, 13 aa, synthetic construct
  REGION 1..13: note = Description of Artificial Sequence: Synthetic peptide
SQSVLFSSNNKNY

SEQ ID NO: 461 - protein, 6 aa, synthetic construct
  REGION 1..6: note = Description of Artificial Sequence: Synthetic peptide
YHSTPW

SEQ ID NO: 462 - protein, 13 aa, synthetic construct
  REGION 1..13: note = Description of Artificial Sequence: Synthetic peptide
SQSVLYSSSNKSY

SEQ ID NO: 463 - protein, 13 aa, synthetic construct
  REGION 1..13: note = Description of Artificial Sequence: Synthetic peptide
SQSVLFSSNKKNY

SEQ ID NO: 464 - protein, 6 aa, synthetic construct
  REGION 1..6: note = Description of Artificial Sequence: Synthetic peptide
YNSTPW

SEQ ID NO: 465 - protein, 7 aa, synthetic construct
  REGION 1..7: note = Description of Artificial Sequence: Synthetic peptide
SQSISSW

SEQ ID NO: 466 - skipped

SEQ ID NO: 467 - protein, 6 aa, synthetic construct
  REGION 1..6: note = Description of Artificial Sequence: Synthetic peptide
YNSYSL

SEQ ID NO: 468 - protein, 10 aa, synthetic construct
  REGION 1..10: note = Description of Artificial Sequence: Synthetic peptide
GDSVSSNSAA

SEQ ID NO: 469 - protein, 9 aa, synthetic construct
  REGION 1..9: note = Description of Artificial Sequence: Synthetic peptide
TYYRSKWYN

SEQ ID NO: 470 - protein, 15 aa, synthetic construct
  REGION 1..15: note = Description of Artificial Sequence: Synthetic peptide
AGDRRYGIVGLPFAY

SEQ ID NO: 471 - protein, 10 aa, synthetic construct
  REGION 1..10: note = Description of Artificial Sequence: Synthetic peptide
GDSVSNNSAA

SEQ ID NO: 472 - protein, 12 aa, synthetic construct
  REGION 1..12: note = Description of Artificial Sequence: Synthetic peptide
ARYGSGTLLFDY

SEQ ID NO: 473 - protein, 10 aa, synthetic construct
  REGION 1..10: note = Description of Artificial Sequence: Synthetic peptide
GDSVSSNSAS

SEQ ID NO: 474 - protein, 9 aa, synthetic construct
  REGION 1..9: note = Description of Artificial Sequence: Synthetic peptide
TYYRSEWFN

SEQ ID NO: 475 - protein, 15 aa, synthetic construct
  REGION 1..15: note = Description of Artificial Sequence: Synthetic peptide
AREARIGVAGKGFDY

SEQ ID NO: 476 - protein, 10 aa, synthetic construct
  REGION 1..10: note = Description of Artificial Sequence: Synthetic peptide
GDSVSSNRAA

SEQ ID NO: 477 - protein, 9 aa, synthetic construct
  REGION 1..9: note = Description of Artificial Sequence: Synthetic peptide
TYYRSEWYN

SEQ ID NO: 478 - protein, 11 aa, synthetic construct
  REGION 1..11: note = Description of Artificial Sequence: Synthetic peptide
ARVRAAVPFDY

SEQ ID NO: 479 - protein, 10 aa, synthetic construct
  REGION 1..10: note = Description of Artificial Sequence: Synthetic peptide
GGSITSSSYY

SEQ ID NO: 480 - protein, 7 aa, synthetic construct
  REGION 1..7: note = Description of Artificial Sequence: Synthetic peptide
IYYSGTT

SEQ ID NO: 481 - protein, 9 aa, synthetic construct
  REGION 1..9: note = Description of Artificial Sequence: Synthetic peptide
AAGARDFDS

SEQ ID NO: 482 - protein, 11 aa, synthetic construct
  REGION 1..11: note = Description of Artificial Sequence: Synthetic peptide
ARVRPGIPFDY

SEQ ID NO: 483 - protein, 8 aa, synthetic construct
  REGION 1..8: note = Description of Artificial Sequence: Synthetic peptide
GFTFSSYA

SEQ ID NO: 484 - protein, 8 aa, synthetic construct
  REGION 1..8: note = Description of Artificial Sequence: Synthetic peptide
ISGSGFST

SEQ ID NO: 485 - protein, 13 aa, synthetic construct
  REGION 1..13: note = Description of Artificial Sequence: Synthetic peptide
AKDNLVAGTVFDY

SEQ ID NO: 486 - protein, 12 aa, synthetic construct
  REGION 1..12: note = Description of Artificial Sequence: Synthetic peptide
QSVLHSSNNKNY

SEQ ID NO: 487 - protein, 9 aa, synthetic construct
  REGION 1..9: note = Description of Artificial Sequence: Synthetic peptide
HQYYSTPPT

SEQ ID NO: 488 - protein, 12 aa, synthetic construct
  REGION 1..12: note = Description of Artificial Sequence: Synthetic peptide
QSVLYSSKNKNY

SEQ ID NO: 489 - protein, 10 aa, synthetic construct
  REGION 1..10: note = Description of Artificial Sequence: Synthetic peptide
QQYYSTFPYT

SEQ ID NO: 490 - protein, 12 aa, synthetic construct
  REGION 1..12: note = Description of Artificial Sequence: Synthetic peptide
QSVLFRSNNKNY

SEQ ID NO: 491 - protein, 9 aa, synthetic construct
  REGION 1..9: note = Description of Artificial Sequence: Synthetic peptide
QQYYSTPRT

SEQ ID NO: 492 - protein, 12 aa, synthetic construct
  REGION 1..12: note = Description of Artificial Sequence: Synthetic peptide
QSVLFSSNNKNY

SEQ ID NO: 493 - protein, 9 aa, synthetic construct
  REGION 1..9: note = Description of Artificial Sequence: Synthetic peptide
QQYHSTPWT

SEQ ID NO: 494 - protein, 12 aa, synthetic construct
  REGION 1..12: note = Description of Artificial Sequence: Synthetic peptide
QSVLYSSSNKSY

SEQ ID NO: 495 - protein, 11 aa, synthetic construct
  REGION 1..11: note = Description of Artificial Sequence: Synthetic peptide
QQYYSTPRMYT

SEQ ID NO: 496 - protein, 12 aa, synthetic construct
  REGION 1..12: note = Description of Artificial Sequence: Synthetic peptide
QSVLFSSNKKNY

SEQ ID NO: 497 - protein, 9 aa, synthetic construct
  REGION 1..9: note = Description of Artificial Sequence: Synthetic peptide
QQYNSTPWT

SEQ ID NO: 498 - protein, 6 aa, synthetic construct
  REGION 1..6: note = Description of Artificial Sequence: Synthetic peptide
QSISSW

SEQ ID NO: 499 - protein, 9 aa, synthetic construct
  REGION 1..9: note = Description of Artificial Sequence: Synthetic peptide
QQYNSYSLT

SEQ ID NO: 500 - protein, 12 aa, synthetic construct
  REGION 1..12: note = Description of Artificial Sequence: Synthetic peptide
GDSVSSNSAAWN

SEQ ID NO: 501 - protein, 11 aa, synthetic construct
  REGION 1..11: note = Description of Artificial Sequence: Synthetic peptide
RTYYRSKWYND

SEQ ID NO: 502 - protein, 13 aa, synthetic construct
  REGION 1..13: note = Description of Artificial Sequence: Synthetic peptide
DRRYGIVGLPFAY

SEQ ID NO: 503 - protein, 12 aa, synthetic construct
  REGION 1..12: note = Description of Artificial Sequence: Synthetic peptide
GDSVSNNSAAWN

SEQ ID NO: 504 - protein, 10 aa, synthetic construct
  REGION 1..10: note = Description of Artificial Sequence: Synthetic peptide
YGSGTLLFDY

SEQ ID NO: 505 - protein, 12 aa, synthetic construct
  REGION 1..12: note = Description of Artificial Sequence: Synthetic peptide
GDSVSSNSASWN

SEQ ID NO: 506 - protein, 11 aa, synthetic construct
  REGION 1..11: note = Description of Artificial Sequence: Synthetic peptide
RTYYRSEWFND

SEQ ID NO: 507 - protein, 13 aa, synthetic construct
  REGION 1..13: note = Description of Artificial Sequence: Synthetic peptide
EARIGVAGKGFDY

SEQ ID NO: 508 - protein, 12 aa, synthetic construct
  REGION 1..12: note = Description of Artificial Sequence: Synthetic peptide
GDSVSSNRAAWN

SEQ ID NO: 509 - protein, 11 aa, synthetic construct
  REGION 1..11: note = Description of Artificial Sequence: Synthetic peptide
RTYYRSEWYND

SEQ ID NO: 510 - protein, 9 aa, synthetic construct
  REGION 1..9: note = Description of Artificial Sequence: Synthetic peptide
VRAAVPFDY

SEQ ID NO: 511 - protein, 12 aa, synthetic construct
  REGION 1..12: note = Description of Artificial Sequence: Synthetic peptide
GGSITSSSYYWG

SEQ ID NO: 512 - protein, 9 aa, synthetic construct
  REGION 1..9: note = Description of Artificial Sequence: Synthetic peptide
NIYYSGTTY

SEQ ID NO: 513 - protein, 7 aa, synthetic construct
  REGION 1..7: note = Description of Artificial Sequence: Synthetic peptide
GARDFDS

SEQ ID NO: 514 - protein, 9 aa, synthetic construct
  REGION 1..9: note = Description of Artificial Sequence: Synthetic peptide
VRPGIPFDY

SEQ ID NO: 515 - protein, 10 aa, synthetic construct
  REGION 1..10: note = Description of Artificial Sequence: Synthetic peptide
GFTFSSYAMH

SEQ ID NO: 516 - protein, 10 aa, synthetic construct
  REGION 1..10: note = Description of Artificial Sequence: Synthetic peptide
GISGSGFSTY

SEQ ID NO: 517 - protein, 11 aa, synthetic construct
  REGION 1..11: note = Description of Artificial Sequence: Synthetic peptide
DNLVAGTVFDY

SEQ ID NO: 518 - protein, 17 aa, synthetic construct
  REGION 1..17: note = Description of Artificial Sequence: Synthetic peptide
KSSQSVLHSSNNKNYLT

SEQ ID NO: 519 - protein, 7 aa, synthetic construct
  REGION 1..7: note = Description of Artificial Sequence: Synthetic peptide
WASTRES

SEQ ID NO: 520 - protein, 9 aa, synthetic construct
  REGION 1..9: note = Description of Artificial Sequence: Synthetic peptide
HQYYSTPPT

SEQ ID NO: 521 - protein, 17 aa, synthetic construct
  REGION 1..17: note = Description of Artificial Sequence: Synthetic peptide
KSSQSVLYSSKNKNYLA

SEQ ID NO: 522 - protein, 10 aa, synthetic construct
  REGION 1..10: note = Description of Artificial Sequence: Synthetic peptide
QQYYSTFPYT

SEQ ID NO: 523 - protein, 17 aa, synthetic construct
  REGION 1..17: note = Description of Artificial Sequence: Synthetic peptide
KSSQSVLFRSNNKNYLA

SEQ ID NO: 524 - protein, 9 aa, synthetic construct
  REGION 1..9: note = Description of Artificial Sequence: Synthetic peptide
QQYYSTPRT

SEQ ID NO: 525 - protein, 17 aa, synthetic construct
  REGION 1..17: note = Description of Artificial Sequence: Synthetic peptide
KSSQSVLFSSNNKNYLA

SEQ ID NO: 526 - protein, 9 aa, synthetic construct
  REGION 1..9: note = Description of Artificial Sequence: Synthetic peptide
QQYHSTPWT

SEQ ID NO: 527 - protein, 17 aa, synthetic construct
  REGION 1..17: note = Description of Artificial Sequence: Synthetic peptide
KSSQSVLYSSSNKSYLA

SEQ ID NO: 528 - protein, 11 aa, synthetic construct
  REGION 1..11: note = Description of Artificial Sequence: Synthetic peptide
QQYYSTPRMYT

SEQ ID NO: 529 - protein, 17 aa, synthetic construct
  REGION 1..17: note = Description of Artificial Sequence: Synthetic peptide
KSSQSVLFSSNKKNYLA

SEQ ID NO: 530 - protein, 9 aa, synthetic construct
  REGION 1..9: note = Description of Artificial Sequence: Synthetic peptide
QQYNSTPWT

SEQ ID NO: 531 - protein, 17 aa, synthetic construct
  REGION 1..17: note = Description of Artificial Sequence: Synthetic peptide
ESSQSVLFSSNKKNYLA

SEQ ID NO: 532 - protein, 11 aa, synthetic construct
  REGION 1..11: note = Description of Artificial Sequence: Synthetic peptide
RASQSISSWLA

SEQ ID NO: 533 - protein, 7 aa, synthetic construct
  REGION 1..7: note = Description of Artificial Sequence: Synthetic peptide
KASSLES

SEQ ID NO: 534 - protein, 9 aa, synthetic construct
  REGION 1..9: note = Description of Artificial Sequence: Synthetic peptide
QQYNSYSLT

SEQ ID NO: 535 - protein, 455 aa, synthetic construct
  REGION 1..455: note = Description of Artificial Sequence: Synthetic polypeptide
QVQLQQSGPGLVKPSQTLSLTCAISGDSVSSNSAAWNWIRQSPSRGLEWLGRTYYRSKWYNDYAVSVKSRITINPDTSKNQISLQLNSVTPEDTAVYYCAGDRRYGIVGLPFAYWGQGTLVTVSSASTKGPSVFPLAPSSKSTSGGTAALGCLVKDYFPEPVTVSWNSGALTSGVHTFPAVLQSSGLYSLSSVVTVPSSSLGTQTYICNVNHKPSNTKVDKKVEPKSCDKTHTCPPCPAPELLGGPSVFLFPPKPKDTLMISRTPEVTCVVVDVSHEDPEVKFNWYVDGVEVHNAKTKPREEQYNSTYRVVSVLTVLHQDWLNGKEYKCKVSNKALPAPIEKTISKAKGQPREPQVYTLPPSREEMTKNQVSLTCLVKGFYPSDIAVEWESNGQPENNYKTTPPVLDSDGSFFLYSKLTVDKSRWQQGNVFSCSVMHEALHNHYTQKSLSLSPGK

SEQ ID NO: 536 - protein, 452 aa, synthetic construct
  REGION 1..452: note = Description of Artificial Sequence: Synthetic polypeptide
QVQLQQSGPGLVKPSQTLSLTCAISGDSVSNNSAAWNWIRQSPSRGLEWLGRTYYRSKWYNDYAVSVKSRITINPDTSKNQFSLQLNSVTPEDTAVYYCARYGSGTLLFDYWGQGTLVTVSSASTKGPSVFPLAPSSKSTSGGTAALGCLVKDYFPEPVTVSWNSGALTSGVHTFPAVLQSSGLYSLSSVVTVPSSSLGTQTYICNVNHKPSNTKVDKKVEPKSCDKTHTCPPCPAPELLGGPSVFLFPPKPKDTLMISRTPEVTCVVVDVSHEDPEVKFNWYVDGVEVHNAKTKPREEQYNSTYRVVSVLTVLHQDWLNGKEYKCKVSNKALPAPIEKTISKAKGQPREPQVYTLPPSREEMTKNQVSLTCLVKGFYPSDIAVEWESNGQPENNYKTTPPVLDSDGSFFLYSKLTVDKSRWQQGNVFSCSVMHEALHNHYTQKSLSLSPGK

SEQ ID NO: 537 - protein, 455 aa, synthetic construct
  REGION 1..455: note = Description of Artificial Sequence: Synthetic polypeptide
QVQLQQSGPGLVRPSQTLSVTCAISGDSVSSNSASWNWIRQSPSRGLEWLGRTYYRSEWFNDYAVSVKSRVTINPDTSKNQLSLQLNSVIPEDTAVYYCAREARIGVAGKGFDYWGQGTLVTVSSASTKGPSVFPLAPSSKSTSGGTAALGCLVKDYFPEPVTVSWNSGALTSGVHTFPAVLQSSGLYSLSSVVTVPSSSLGTQTYICNVNHKPSNTKVDKKVEPKSCDKTHTCPPCPAPELLGGPSVFLFPPKPKDTLMISRTPEVTCVVVDVSHEDPEVKFNWYVDGVEVHNAKTKPREEQYNSTYRVVSVLTVLHQDWLNGKEYKCKVSNKALPAPIEKTISKAKGQPREPQVYTLPPSREEMTKNQVSLTCLVKGFYPSDIAVEWESNGQPENNYKTTPPVLDSDGSFFLYSKLTVDKSRWQQGNVFSCSVMHEALHNHYTQKSLSLSPGK

SEQ ID NO: 538 - protein, 451 aa, synthetic construct
  REGION 1..451: note = Description of Artificial Sequence: Synthetic polypeptide
QVQLQQSGPGLVKPSQTLSLTCAISGDSVSSNRAAWNWIRQTPSRGLEWLGRTYYRSEWYNDYAVSVKSRITINPDTSKNQFSLQLNSVTPEDTAVYYCARVRAAVPFDYWGQGTLVTVSSASTKGPSVFPLAPSSKSTSGGTAALGCLVKDYFPEPVTVSWNSGALTSGVHTFPAVLQSSGLYSLSSVVTVPSSSLGTQTYICNVNHKPSNTKVDKKVEPKSCDKTHTCPPCPAPELLGGPSVFLFPPKPKDTLMISRTPEVTCVVVDVSHEDPEVKFNWYVDGVEVHNAKTKPREEQYNSTYRVVSVLTVLHQDWLNGKEYKCKVSNKALPAPIEKTISKAKGQPREPQVYTLPPSREEMTKNQVSLTCLVKGFYPSDIAVEWESNGQPENNYKTTPPVLDSDGSFFLYSKLTVDKSRWQQGNVFSCSVMHEALHNHYTQKSLSLSPGK

SEQ ID NO: 539 - protein, 447 aa, synthetic construct
  REGION 1..447: note = Description of Artificial Sequence: Synthetic polypeptide
QLQLQESGPGLVKPSETLSLMCTVSGGSITSSSYYWGWIRQPPGKGLEWIGNIYYSGTTYYNPSLKSRVTISVDTSKNQFSLKLSSVTAADTAVYYCAAGARDFDSWGQGSLVTVSSASTKGPSVFPLAPSSKSTSGGTAALGCLVKDYFPEPVTVSWNSGALTSGVHTFPAVLQSSGLYSLSSVVTVPSSSLGTQTYICNVNHKPSNTKVDKKVEPKSCDKTHTCPPCPAPELLGGPSVFLFPPKPKDTLMISRTPEVTCVVVDVSHEDPEVKFNWYVDGVEVHNAKTKPREEQYNSTYRVVSVLTVLHQDWLNGKEYKCKVSNKALPAPIEKTISKAKGQPREPQVYTLPPSREEMTKNQVSLTCLVKGFYPSDIAVEWESNGQPENNYKTTPPVLDSDGSFFLYSKLTVDKSRWQQGNVFSCSVMHEALHNHYTQKSLSLSPGK

SEQ ID NO: 540 - protein, 451 aa, synthetic construct
  REGION 1..451: note = Description of Artificial Sequence: Synthetic polypeptide
EVQLLESGPGLVKPSQTLSLTCVISGDSVSSNRAAWNWIRQSPSRGLEWLGRTYYRSKWYNDYAVSVKSRITINSDTSKNQISLQLNSVTPEDTAVYYCARVRPGIPFDYWGQGTPVTVSSASTKGPSVFPLAPSSKSTSGGTAALGCLVKDYFPEPVTVSWNSGALTSGVHTFPAVLQSSGLYSLSSVVTVPSSSLGTQTYICNVNHKPSNTKVDKKVEPKSCDKTHTCPPCPAPELLGGPSVFLFPPKPKDTLMISRTPEVTCVVVDVSHEDPEVKFNWYVDGVEVHNAKTKPREEQYNSTYRVVSVLTVLHQDWLNGKEYKCKVSNKALPAPIEKTISKAKGQPREPQVYTLPPSREEMTKNQVSLTCLVKGFYPSDIAVEWESNGQPENNYKTTPPVLDSDGSFFLYSKLTVDKSRWQQGNVFSCSVMHEALHNHYTQKSLSLSPGK

SEQ ID NO: 541 - protein, 451 aa, synthetic construct
  REGION 1..451: note = Description of Artificial Sequence: Synthetic polypeptide
QVQLQQSGPGLVKPSQTLSLTCVISGDSVSSNRAAWNWIRQSPSRGLEWLGRTYYRSKWYNDYAVSVKSRITINSDTSKNQISLQLNSVTPEDTAVYYCARVRPGIPFDYWGQGTTVTVSSASTKGPSVFPLAPSSKSTSGGTAALGCLVKDYFPEPVTVSWNSGALTSGVHTFPAVLQSSGLYSLSSVVTVPSSSLGTQTYICNVNHKPSNTKVDKKVEPKSCDKTHTCPPCPAPELLGGPSVFLFPPKPKDTLMISRTPEVTCVVVDVSHEDPEVKFNWYVDGVEVHNAKTKPREEQYNSTYRVVSVLTVLHQDWLNGKEYKCKVSNKALPAPIEKTISKAKGQPREPQVYTLPPSREEMTKNQVSLTCLVKGFYPSDIAVEWESNGQPENNYKTTPPVLDSDGSFFLYSKLTVDKSRWQQGNVFSCSVMHEALHNHYTQKSLSLSPGK

SEQ ID NO: 542 - protein, 450 aa, synthetic construct
  REGION 1..450: note = Description of Artificial Sequence: Synthetic polypeptide
EVQLLESGGGLVQPGGSLRLSCAASGFTFSSYAMHWVRQAPGKGLDWVSGISGSGFSTYYVDSVKGRFTISRDNSKHTLYLQMNSLRAEDTAVYYCAKDNLVAGTVFDYWGQGTLVTVSSASTKGPSVFPLAPSSKSTSGGTAALGCLVKDYFPEPVTVSWNSGALTSGVHTFPAVLQSSGLYSLSSVVTVPSSSLGTQTYICNVNHKPSNTKVDKKVEPKSCDKTHTCPPCPAPELLGGPSVFLFPPKPKDTLMISRTPEVTCVVVDVSHEDPEVKFNWYVDGVEVHNAKTKPREEQYNSTYRVVSVLTVLHQDWLNGKEYKCKVSNKALPAPIEKTISKAKGQPREPQVYTLPPSREEMTKNQVSLTCLVKGFYPSDIAVEWESNGQPENNYKTTPPVLDSDGSFFLYSKLTVDKSRWQQGNVFSCSVMHEALHNHYTQKSLSLSPGK

SEQ ID NO: 543 - protein, 454 aa, synthetic construct
  REGION 1..454: note = Description of Artificial Sequence: Synthetic polypeptide
QVQLQQSGPGLVKPSQTLSLTCAISGDSVSSNSAAWNWIRQSPSRGLEWLGRTYYRSKWYNDYAVSVKSRITINPDTSKNQISLQLNSVTPEDTAVYYCAGDRRYGIVGLPFAYWGQGTLVTVSSASTKGPSVFPLAPSSKSTSGGTAALGCLVKDYFPEPVTVSWNSGALTSGVHTFPAVLQSSGLYSLSSVVTVPSSSLGTQTYICNVNHKPSNTKVDKKVEPKSCDKTHTCPPCPAPELLGGPSVFLFPPKPKDTLMISRTPEVTCVVVDVSHEDPEVKFNWYVDGVEVHNAKTKPREEQYNSTYRVVSVLTVLHQDWLNGKEYKCKVSNKALPAPIEKTISKAKGQPREPQVYTLPPSREEMTKNQVSLTCLVKGFYPSDIAVEWESNGQPENNYKTTPPVLDSDGSFFLYSKLTVDKSRWQQGNVFSCSVMHEALHNHYTQKSLSLSPG

SEQ ID NO: 544 - protein, 449 aa, synthetic construct
  REGION 1..449: note = Description of Artificial Sequence: Synthetic polypeptide
EVQLLESGGGLVQPGGSLRLSCAASGFTFSSYAMHWVRQAPGKGLEWVSGISGSGFSTYYVDSVKGRFTISRDNSKNTLYLQMNSLRAEDTAVYYCAKDNLVAGTVFDYWGQGTLVTVSSASTKGPSVFPLAPSSKSTSGGTAALGCLVKDYFPEPVTVSWNSGALTSGVHTFPAVLQSSGLYSLSSVVTVPSSSLGTQTYICNVNHKPSNTKVDKKVEPKSCDKTHTCPPCPAPELLGGPSVFLFPPKPKDTLMISRTPEVTCVVVDVSHEDPEVKFNWYVDGVEVHNAKTKPREEQYNSTYRVVSVLTVLHQDWLNGKEYKCKVSNKALPAPIEKTISKAKGQPREPQVYTLPPSREEMTKNQVSLTCLVKGFYPSDIAVEWESNGQPENNYKTTPPVLDSDGSFFLYSKLTVDKSRWQQGNVFSCSVMHEALHNHYTQKSLSLSPG

SEQ ID NO: 545 - protein, 450 aa, synthetic construct
  REGION 1..450: note = Description of Artificial Sequence: Synthetic polypeptide
QVQLQQSGPGLVKPSQTLSLTCAISGDSVSSNRAAWNWIRQSPSRGLEWLGRTYYRSKWYNDYAVSVKSRITINPDTSKNQISLQLNSVTPEDTAVYYCARVRPGIPFDYWGQGTPVTVSSASTKGPSVFPLAPSSKSTSGGTAALGCLVKDYFPEPVTVSWNSGALTSGVHTFPAVLQSSGLYSLSSVVTVPSSSLGTQTYICNVNHKPSNTKVDKKVEPKSCDKTHTCPPCPAPELLGGPSVFLFPPKPKDTLMISRTPEVTCVVVDVSHEDPEVKFNWYVDGVEVHNAKTKPREEQYNSTYRVVSVLTVLHQDWLNGKEYKCKVSNKALPAPIEKTISKAKGQPREPQVYTLPPSREEMTKNQVSLTCLVKGFYPSDIAVEWESNGQPENNYKTTPPVLDSDGSFFLYSKLTVDKSRWQQGNVFSCSVMHEALHNHYTQKSLSLSPG

SEQ ID NO: 546 - protein, 220 aa, synthetic construct
  REGION 1..220: note = Description of Artificial Sequence: Synthetic polypeptide
DIVMTQSPDSLAVSLGERATINCKSSQSVLHSSNNKNYLTWFQQKPGQPPKLLIYWASTRESGVPDRFSGSGSGTDFTLTISSLQAEDVAVYYCHQYYSTPPTFGQGTKVEIKRTVAAPSVFIFPPSDEQLKSGTASVVCLLNNFYPREAKVQWKVDNALQSGNSQESVTEQDSKDSTYSLSSTLTLSKADYEKHKVYACEVTHQGLSSPVTKSFNRGEC

SEQ ID NO: 547 - protein, 221 aa, synthetic construct
  REGION 1..221: note = Description of Artificial Sequence: Synthetic polypeptide
DIVMTQSPDSLAVSLGERATINCKSSQSVLYSSKNKNYLAWYQQKPGQPPKLLIYWASTRESGVPDRFSGSGSGTDFTLTISSLQAEDVAVYYCQQYYSTFPYTFGQGTKLEIKRTVAAPSVFIFPPSDEQLKSGTASVVCLLNNFYPREAKVQWKVDNALQSGNSQESVTEQDSKDSTYSLSSTLTLSKADYEKHKVYACEVTHQGLSSPVTKSFNRGEC

SEQ ID NO: 548 - protein, 220 aa, synthetic construct
  REGION 1..220: note = Description of Artificial Sequence: Synthetic polypeptide
DIVMTQSPDSLAVSLGERATINCKSSQSVLFRSNNKNYLAWFQQKPGQPPKLLIYWASTRESGVPDRFSGSGSGTDFTLTISSLQAEDVAVYYCQQYYSTPRTFGQGTKVEIKRTVAAPSVFIFPPSDEQLKSGTASVVCLLNNFYPREAKVQWKVDNALQSGNSQESVTEQDSKDSTYSLSSTLTLSKADYEKHKVYACEVTHQGLSSPVTKSFNRGEC

SEQ ID NO: 549 - protein, 220 aa, synthetic construct
  REGION 1..220: note = Description of Artificial Sequence: Synthetic polypeptide
DIVMTQSPDSLAVSLGERATINCKSSQSVLFSSNNKNYLAWYQQKPGQPPNLLIYWASTRESGVPDRFSGSVSGTDFTLTISSLQAEDVAIYYCQQYHSTPWTFGQGTKVEIKRTVAAPSVFIFPPSDEQLKSGTASVVCLLNNFYPREAKVQWKVDNALQSGNSQESVTEQDSKDSTYSLSSTLTLSKADYEKHKVYACEVTHQGLSSPVTKSFNRGEC

SEQ ID NO: 550 - protein, 222 aa, synthetic construct
  REGION 1..222: note = Description of Artificial Sequence: Synthetic polypeptide
DIVMTQSPDSLAVSLGERATINCKSSQSVLYSSSNKSYLAWYQQRPGQPPKLLIYWASTRESGVPDRFSGSGSGTDFTLTISSLQAEDVAVYYCQQYYSTPRMYTFGQGTKLEIKRTVAAPSVFIFPPSDEQLKSGTASVVCLLNNFYPREAKVQWKVDNALQSGNSQESVTEQDSKDSTYSLSSTLTLSKADYEKHKVYACEVTHQGLSSPVTKSFNRGEC

SEQ ID NO: 551 - protein, 220 aa, synthetic construct
  REGION 1..220: note = Description of Artificial Sequence: Synthetic polypeptide
DIVMTQSPDSLAVSLGERATINCKSSQSVLFSSNKKNYLAWYQQKPGQPPKLLIYWASTRESGVPDRFSGSGSGTDFTLTISSLQAEDVAVYYCQQYNSTPWTFGQGTKVEIKRTVAAPSVFIFPPSDEQLKSGTASVVCLLNNFYPREAKVQWKVDNALQSGNSQESVTEQDSKDSTYSLSSTLTLSKADYEKHKVYACEVTHQGLSSPVTKSFNRGEC

SEQ ID NO: 552 - protein, 220 aa, synthetic construct
  REGION 1..220: note = Description of Artificial Sequence: Synthetic polypeptide
DIQMTQSPDSLAVSLGERATINCESSQSVLFSSNKKNYLAWYQQKPGQPPKLLIYWASTRESGVPDRFSGSGSGTDFTLTINRLQAEDVAVYYCQQYNSTPWTFGQGTKVEIKRTVAAPSVFIFPPSDEQLKSGTASVVCLLNNFYPREAKVQWKVDNALQSGNSQESVTEQDSKDSTYSLSSTLTLSKADYEKHKVYACEVTHQGLSSPVTKSFNRGEC

SEQ ID NO: 553 - protein, 214 aa, synthetic construct
  REGION 1..214: note = Description of Artificial Sequence: Synthetic polypeptide
DIQMTQSPSTLSASVGDRVTITCRASQSISSWLAWYQQKPGKAPKLLIYKASSLESGVPSRFSGSGSGTEFTLTISSLQPDDFATYYCQQYNSYSLTFGGGTKVDIKRTVAAPSVFIFPPSDEQLKSGTASVVCLLNNFYPREAKVQWKVDNALQSGNSQESVTEQDSKDSTYSLSSTLTLSKADYEKHKVYACEVTHQGLSSPVTKSFNRGEC

SEQ ID NO: 554 - protein, 220 aa, synthetic construct; identical to SEQ ID NO: 546
  REGION 1..220: note = Description of Artificial Sequence: Synthetic polypeptide

SEQ ID NO: 555 - protein, 214 aa, synthetic construct; identical to SEQ ID NO: 553
  REGION 1..214: note = Description of Artificial Sequence: Synthetic polypeptide

SEQ ID NO: 556 - protein, 220 aa, synthetic construct
  REGION 1..220: note = Description of Artificial Sequence: Synthetic polypeptide
DIVMTQSPDSLAVSLGERATINCKSSQSVLFSSNNKNYLAWYQQKPGQPPKLLIYWASTRESGVPDRFSGSVSGTDFTLTISSLQAEDVAVYYCQQYHSTPWTFGQGTKVEIKRTVAAPSVFIFPPSDEQLKSGTASVVCLLNNFYPREAKVQWKVDNALQSGNSQESVTEQDSKDSTYSLSSTLTLSKADYEKHKVYACEVTHQGLSSPVTKSFNRGEC

SEQ ID NO: 557 - DNA, 1365 bp, synthetic construct
  misc_feature 1..1365: note = Description of Artificial Sequence: Synthetic polynucleotide
  source 1..1365: mol_type = other DNA
caggtgcagctgcagcagagcggccctggactggtgaagcccagccagaccctgagcctgacctgcgctatcagcggcgatagcgtgagctccaacagcgccgcctggaactggatcaggcagagccctagcaggggcctggaatggctgggcaggacctactacaggagcaagtggtacaacgactacgccgtgtccgtgaagagcaggatcaccatcaaccccgacaccagcaagaaccagatcagcctgcagctgaacagcgtgacccccgaggacaccgccgtgtactactgcgccggcgacagaaggtacggcatcgtgggcctgcctttcgcctactggggccagggaaccctggtgaccgtgagcagcgcctccaccaagggcccatcggtcttccccctggcaccctcctccaagagcacctctgggggcacagcggccctgggctgcctggtcaaggactacttccccgaaccggtgacggtgtcgtggaactcaggcgccctgaccagcggcgtgcacaccttcccggctgtcctacagtcctcaggactctactccctcagcagcgtggtgaccgtgccctccagcagcttgggcacccagacctacatctgcaacgtgaatcacaagcccagcaacaccaaggtggacaagaaagttgagcccaaatcttgtgacaaaactcacacatgcccaccgtgcccagcacctgaactcctggggggaccgtcagtcttcctcttccccccaaaacccaaggacaccctcatgatctcccggacccctgaggtcacatgcgtggtggtggacgtgagccacgaagaccctgaggtcaagttcaactggtacgtggacggcgtggaggtgcataatgccaagacaaagccgcgggaggagcagtacaacagcacgtaccgtgtggtcagcgtcctcaccgtcctgcaccaggactggctgaatggcaaggagtacaagtgcaaggtctccaacaaagccctcccagcccccatcgagaaaaccatctccaaagccaaagggcagccccgagaaccacaggtgtacaccctgcccccatcccgggaggagatgaccaagaaccaggtcagcctgacctgcctggtcaaaggcttctatcccagcgacatcgccgtggagtgggagagcaatgggcagccggagaacaactacaagaccacgcctcccgtgctggactccgacggctccttcttcctctacagcaagctcaccgtggacaagagcaggtggcagcaggggaacgtcttctcatgctccgtgatgcatgaggctctgcacaaccactacacgcagaagagcctctccctgtctccgggtaaa

SEQ ID NO: 558 - DNA, 660 bp, synthetic construct
  misc_feature 1..660: note = Description of Artificial Sequence: Synthetic polynucleotide
  source 1..660: mol_type = other DNA
gacatcgtgatgacccagagccccgatagcctggctgtgagcctgggcgagagagccaccatcaactgcaagagcagccagagcgtgctgcacagcagcaacaacaagaactacctgacctggttccagcagaagcccggccagcctcccaagctgctgatctactgggctagcaccagagagtccggcgtgcctgacaggttcagcggaagcggcagcggcaccgacttcaccctgaccatcagcagcctgcaggccgaggacgtggccgtgtactactgccaccagtactacagcaccccccctacctttggccagggcaccaaggtggagatcaagcgtacggtggctgcaccatctgtcttcatcttcccgccatctgatgagcagttgaaatctggaactgcctctgttgtgtgcctgctgaataacttctatcccagagaggccaaagtacagtggaaggtggataacgccctccaatcgggtaactcccaggagagtgtcacagagcaggacagcaaggacagcacctacagcctcagcagcaccctgacgctgagcaaagcagactacgagaaacacaaagtctacgcctgcgaagtcacccatcagggcctgagctcgcccgtcacaaagagcttcaacaggggagagtgt

SEQ ID NO: 559 - DNA, 1356 bp, synthetic construct
  misc_feature 1..1356: note = Description of Artificial Sequence: Synthetic polynucleotide
  source 1..1356: mol_type = other DNA
caggtgcagctgcagcagagcggacccggcctggtgaaacccagccagaccctgagcctgacctgcgccatcagcggcgacagcgtgagcaacaacagcgccgcctggaactggatcaggcagagccccagcagaggcctggaatggctgggcaggacctactacaggagcaagtggtacaacgactacgccgtgagcgtgaagagcaggatcaccatcaaccccgacacctccaagaaccagttcagcctgcagctgaacagcgtgacccccgaggacaccgccgtgtactactgcgccaggtatggcagcggcaccctgctgttcgactactggggccagggcaccctggtgacagtgagcagcgcctccaccaagggcccatcggtcttccccctggcaccctcctccaagagcacctctgggggcacagcggccctgggctgcctggtcaaggactacttccccgaaccggtgacggtgtcgtggaactcaggcgccctgaccagcggcgtgcacaccttcccggctgtcctacagtcctcaggactctactccctcagcagcgtggtgaccgtgccctccagcagcttgggcacccagacctacatctgcaacgtgaatcacaagcccagcaacaccaaggtggacaagaaagttgagcccaaatcttgtgacaaaactcacacatgcccaccgtgcccagcacctgaactcctggggggaccgtcagtcttcctcttccccccaaaacccaaggacaccctcatgatctcccggacccctgaggtcacatgcgtggtggtggacgtgagccacgaagaccctgaggtcaagttcaactggtacgtggacggcgtggaggtgcataatgccaagacaaagccgcgggaggagcagtacaacagcacgtaccgtgtggtcagcgtcctcaccgtcctgcaccaggactggctgaatggcaaggagtacaagtgcaaggtctccaacaaagccctcccagcccccatcgagaaaaccatctccaaagccaaagggcagccccgagaaccacaggtgtacaccctgcccccatcccgggaggagatgaccaagaaccaggtcagcctgacctgcctggtcaaaggcttctatcccagcgacatcgccgtggagtgggagagcaatgggcagccggagaacaactacaagaccacgcctcccgtgctggactccgacggctccttcttcctctacagcaagctcaccgtggacaagagcaggtggcagcaggggaacgtcttctcatgctccgtgatgcatgaggctctgcacaaccactacacgcagaagagcctctccctgtctccgggtaaa

SEQ ID NO: 560 - DNA, 663 bp, synthetic construct
  misc_feature 1..663: note = Description of Artificial Sequence: Synthetic polynucleotide
  source 1..663: mol_type = other DNA
gacatcgtgatgacccagagccccgatagcctggctgtgagcctgggagagagggccaccatcaactgcaagagcagccagagcgtgctgtacagcagcaagaacaagaactacctggcctggtaccagcagaaacccggccagccccccaagctgctgatctactgggccagcacaagggaaagcggcgtgcccgacagattcagcggaagcggcagcggcaccgacttcaccctgaccatcagcagcctgcaggccgaggatgtggccgtgtactactgccagcagtactacagcaccttcccctacaccttcggccagggcaccaagctggagatcaagcgtacggtggctgcaccatctgtcttcatcttcccgccatctgatgagcagttgaaatctggaactgcctctgttgtgtgcctgctgaataacttctatcccagagaggccaaagtacagtggaaggtggataacgccctccaatcgggtaactcccaggagagtgtcacagagcaggacagcaaggacagcacctacagcctcagcagcaccctgacgctgagcaaagcagactacgagaaacacaaagtctacgcctgcgaagtcacccatcagggcctgagctcgcccgtcacaaagagcttcaacaggggagagtgt

SEQ ID NO: 561 - DNA, 1365 bp, synthetic construct
  misc_feature 1..1365: note = Description of Artificial Sequence: Synthetic polynucleotide
  source 1..1365: mol_type = other DNA
caggtgcagctgcagcagagcggacccggactggtgagacccagccagaccctgagcgtgacctgcgccatcagcggcgacagcgtgagcagcaacagcgccagctggaactggatcaggcagagccccagcagaggcctggagtggctgggaaggacatactacaggagcgagtggttcaacgactacgccgtgagcgtgaagagcagggtgaccatcaaccccgacaccagcaagaaccagctgagcctgcagctgaacagcgtgatccccgaggacaccgccgtgtactactgcgccagagaggccagaatcggcgtggccggcaaaggcttcgactactggggccagggcaccctggtgacagtgtccagcgcctccaccaagggcccatcggtcttccccctggcaccctcctccaagagcacctctgggggcacagcggccctgggctgcctggtcaaggactacttccccgaaccggtgacggtgtcgtggaactcaggcgccctgaccagcggcgtgcacaccttcccggctgtcctacagtcctcaggactctactccctcagcagcgtggtgaccgtgccctccagcagcttgggcacccagacctacatctgcaacgtgaatcacaagcccagcaacaccaaggtggacaagaaagttgagcccaaatcttgtgacaaaactcacacatgcccaccgtgcccagcacctgaactcctggggggaccgtcagtcttcctcttccccccaaaacccaaggacaccctcatgatctcccggacccctgaggtcacatgcgtggtggtggacgtgagccacgaagaccctgaggtcaagttcaactggtacgtggacggcgtggaggtgcataatgccaagacaaagccgcgggaggagcagtacaacagcacgtaccgtgtggtcagcgtcctcaccgtcctgcaccaggactggctgaatggcaaggagtacaagtgcaaggtctccaacaaagccctcccagcccccatcgagaaaaccatctccaaagccaaagggcagccccgagaaccacaggtgtacaccctgcccccatcccgggaggagatgaccaagaaccaggtcagcctgacctgcctggtcaaaggcttctatcccagcgacatcgccgtggagtgggagagcaatgggcagccggagaacaactacaagaccacgcctcccgtgctggactccgacggctccttcttcctctacagcaagctcaccgtggacaagagcaggtggcagcaggggaacgtcttctcatgctccgtgatgcatgaggctctgcacaaccactacacgcagaagagcctctccctgtctccgggtaaa

SEQ ID NO: 562 - DNA, 660 bp, synthetic construct
  misc_feature 1..660: note = Description of Artificial Sequence: Synthetic polynucleotide
  source 1..660: mol_type = other DNA
gacatcgtgatgacccagagccctgactccctggctgtgagcctgggcgagagagccaccatcaactgcaagagcagccagagcgtgctgttcaggagcaacaacaagaactacctggcctggttccagcagaagcccggccagcctcccaagctgctgatctactgggccagcaccagagagagcggcgtgcccgatagatttagcggcagcggcagcggcaccgactttaccctgaccatcagctccctgcaggccgaggatgtggccgtgtactactgccagcagtactacagcacccccagaaccttcggccagggcaccaaggtggagatcaagcgtacggtggctgcaccatctgtcttcatcttcccgccatctgatgagcagttgaaatctggaactgcctctgttgtgtgcctgctgaataacttctatcccagagaggccaaagtacagtggaaggtggataacgccctccaatcgggtaactcccaggagagtgtcacagagcaggacagcaaggacagcacctacagcctcagcagcaccctgacgctgagcaaagcagactacgagaaacacaaagtctacgcctgcgaagtcacccatcagggcctgagctcgcccgtcacaaagagcttcaacaggggagagtgt

SEQ ID NO: 563 - DNA, 1353 bp, synthetic construct
  misc_feature 1..1353: note = Description of Artificial Sequence: Synthetic polynucleotide
  source 1..1353: mol_type = other DNA
caggtgcagctgcagcagagcggacctggcctggtgaagcccagccagaccctgagcctgacatgcgccatcagcggcgacagcgtgagcagcaatagggccgcctggaactggatcaggcagacccctagcaggggcctggaatggctgggcaggacatactacaggagcgagtggtacaacgactacgccgtgtccgtgaagagcaggatcaccatcaaccccgacaccagcaagaaccagttcagcctgcagctgaacagcgtgacccccgaggacaccgccgtgtactactgcgccagagtgagagccgccgtgcctttcgactactggggccagggcaccctggtgacagtgagcagcgcctccaccaagggcccatcggtcttccccctggcaccctcctccaagagcacctctgggggcacagcggccctgggctgcctggtcaaggactacttccccgaaccggtgacggtgtcgtggaactcaggcgccctgaccagcggcgtgcacaccttcccggctgtcctacagtcctcaggactctactccctcagcagcgtggtgaccgtgccctccagcagcttgggcacccagacctacatctgcaacgtgaatcacaagcccagcaacaccaaggtggacaagaaagttgagcccaaatcttgtgacaaaactcacacatgcccaccgtgcccagcacctgaactcctggggggaccgtcagtcttcctcttccccccaaaacccaaggacaccctcatgatctcccggacccctgaggtcacatgcgtggtggtggacgtgagccacgaagaccctgaggtcaagttcaactggtacgtggacggcgtggaggtgcataatgccaagacaaagccgcgggaggagcagtacaacagcacgtaccgtgtggtcagcgtcctcaccgtcctgcaccaggactggctgaatggcaaggagtacaagtgcaaggtctccaacaaagccctcccagcccccatcgagaaaaccatctccaaagccaaagggcagccccgagaaccacaggtgtacaccctgcccccatcccgggaggagatgaccaagaaccaggtcagcctgacctgcctggtcaaaggcttctatcccagcgacatcgccgtggagtgggagagcaatgggcagccggagaacaactacaagaccacgcctcccgtgctggactccgacggctccttcttcctctacagcaagctcaccgtggacaagagcaggtggcagcaggggaacgtcttctcatgctccgtgatgcatgaggctctgcacaaccactacacgcagaagagcctctccctgtctccgggtaaa

SEQ ID NO: 564 - DNA, 660 bp, synthetic construct
  misc_feature 1..660: note = Description of Artificial Sequence: Synthetic polynucleotide
  source 1..660: mol_type = other DNA
gacatcgtgatgacccagagccccgatagcctggctgtgagcctgggcgagagggccaccatcaactgcaagagcagccagagcgtgctgttttccagcaacaacaagaactacctggcctggtaccagcagaaacccggccagccccccaacctgctgatctactgggccagcaccagagaaagcggcgtgcccgacaggtttagcggcagcgtgagcggcaccgacttcaccctgaccatcagcagcctgcaggccgaggacgtggccatctactactgccagcagtaccacagcaccccctggacattcggccagggcaccaaggtggagatcaagcgtacggtggctgcaccatctgtcttcatcttcccgccatctgatgagcagttgaaatctggaactgcctctgttgtgtgcctgctgaataacttctatcccagagaggccaaagtacagtggaaggtggataacgccctccaatcgggtaactcccaggagagtgtcacagagcaggacagcaaggacagcacctacagcctcagcagcaccctgacgctgagcaaagcagactacgagaaacacaaagtctacgcctgcgaagtcacccatcagggcctgagctcgcccgtcacaaagagcttcaacaggggagagtgt

SEQ ID NO: 565 - DNA, 1341 bp, synthetic construct
  misc_feature 1..1341: note = Description of Artificial Sequence: Synthetic polynucleotide
  source 1..1341: mol_type = other DNA
cagctgcagctgcaggagagcggccctggactggtgaagcccagcgagaccctgagcctgatgtgcaccgtgagcggcggcagcatcaccagcagcagctactactggggatggatcagacagccccctggcaagggcctggagtggatcggcaacatctactacagcggcaccacctactacaaccccagcctgaagagcagggtgaccatcagcgtggacaccagcaagaaccagttcagcctgaagctgagcagcgtgacagctgccgacaccgccgtgtactactgtgccgccggagccagagacttcgacagctggggacagggcagcctggtgaccgtgtccagcgcctccaccaagggcccatcggtcttccccctggcaccctcctccaagagcacctctgggggcacagcggccctgggctgcctggtcaaggactacttccccgaaccggtgacggtgtcgtggaactcaggcgccctgaccagcggcgtgcacaccttcccggctgtcctacagtcctcaggactctactccctcagcagcgtggtgaccgtgccctccagcagcttgggcacccagacctacatctgcaacgtgaatcacaagcccagcaacaccaaggtggacaagaaagttgagcccaaatcttgtgacaaaactcacacatgcccaccgtgcccagcacctgaactcctggggggaccgtcagtcttcctcttccccccaaaacccaaggacaccctcatgatctcccggacccctgaggtcacatgcgtggtggtggacgtgagccacgaagaccctgaggtcaagttcaactggtacgtggacggcgtggaggtgcataatgccaagacaaagccgcgggaggagcagtacaacagcacgtaccgtgtggtcagcgtcctcaccgtcctgcaccaggactggctgaatggcaaggagtacaagtgcaaggtctccaacaaagccctcccagcccccatcgagaaaaccatctccaaagccaaagggcagccccgagaaccacaggtgtacaccctgcccccatcccgggaggagatgaccaagaaccaggtcagcctgacctgcctggtcaaaggcttctatcccagcgacatcgccgtggagtgggagagcaatgggcagccggagaacaactacaagaccacgcctcccgtgctggactccgacggctccttcttcctctacagcaagctcaccgtggacaagagcaggtggcagcaggggaacgtcttctcatgctccgtgatgcatgaggctctgcacaaccactacacgcagaagagcctctccctgtctccgggtaaa

SEQ ID NO: 566 - DNA, 666 bp, synthetic construct
  misc_feature 1..666: note = Description of Artificial Sequence: Synthetic polynucleotide
  source 1..666: mol_type = other DNA
gacatcgtgatgacccagagccctgatagcctggccgtgagcctgggagagagagccaccatcaactgcaagtcctcccagagcgtgctgtacagctccagcaacaagagctacctggcctggtaccagcagaggcccggacagcctcccaagctgctgatctactgggccagcaccagagagagcggcgtgcctgacaggtttagcggctccggctccggcaccgactttaccctgaccatcagcagcctgcaggccgaggatgtggccgtgtactactgccagcagtactacagcacccccaggatgtacaccttcggccagggcaccaagctggagatcaagcgtacggtggctgcaccatctgtcttcatcttcccgccatctgatgagcagttgaaatctggaactgcctctgttgtgtgcctgctgaataacttctatcccagagaggccaaagtacagtggaaggtggataacgccctccaatcgggtaactcccaggagagtgtcacagagcaggacagcaaggacagcacctacagcctcagcagcaccctgacgctgagcaaagcagactacgagaaacacaaagtctacgcctgcgaagtcacccatcagggcctgagctcgcccgtcacaaagagcttcaacaggggagagtgt

SEQ ID NO: 567 - DNA, 1353 bp, synthetic construct
  misc_feature 1..1353: note = Description of Artificial Sequence: Synthetic polynucleotide
  source 1..1353: mol_type = other DNA
gaggtgcagctgttggagtcaggtccaggactggtgaagccctcgcagaccctctcactcacctgtgtcatctccggggacagtgtctctagcaacagagctgcttggaactggatcaggcagtccccatcgagaggccttgagtggctgggaaggacatactacaggtccaagtggtataatgattatgcagtatctgtgaaaagtcgaataaccatcaattcagacacatccaagaaccagatctccctgcagttgaactctgtgactcccgaggacacggctgtgtattactgtgcaagagtgagaccggggatcccatttgactactggggccagggaaccccggtcaccgtctcctcagcctccaccaagggcccatcggtcttccccctggcaccctcctccaagagcacctctgggggcacagcggccctgggctgcctggtcaaggactacttccccgaaccggtgacggtgtcgtggaactcaggcgccctgaccagcggcgtgcacaccttcccggctgtcctacagtcctcaggactctactccctcagcagcgtggtgaccgtgccctccagcagcttgggcacccagacctacatctgcaacgtgaatcacaagcccagcaacaccaaggtggacaagaaagttgagcccaaatcttgtgacaaaactcacacatgcccaccgtgcccagcacctgaactcctggggggaccgtcagtcttcctcttccccccaaaacccaaggacaccctcatgatctcccggacccctgaggtcacatgcgtggtggtggacgtgagccacgaagaccctgaggtcaagttcaactggtacgtggacggcgtggaggtgcataatgccaagacaaagccgcgggaggagcagtacaacagcacgtaccgtgtggtcagcgtcctcaccgtcctgcaccaggactggctgaatggcaaggagtacaagtgcaaggtctccaacaaagccctcccagcccccatcgagaaaaccatctccaaagccaaagggcagccccgagaaccacaggtgtacaccctgcccccatcccgggaggagatgaccaagaaccaggtcagcctgacctgcctggtcaaaggcttctatcccagcgacatcgccgtggagtgggagagcaatgggcagccggagaacaactacaagaccacgcctcccgtgctggactccgacggctccttcttcctctacagcaagctcaccgtggacaagagcaggtggcagcaggggaacgtcttctcatgctccgtgatgcatgaggctctgcacaaccactacacgcagaagagcctctccctgtctccgggtaaa

SEQ ID NO: 568 - DNA, 660 bp, synthetic construct
  misc_feature 1..660: note = Description of Artificial Sequence: Synthetic polynucleotide
  source 1..660: mol_type = other DNA
gacatcgtgatgacccagtctccagactccctggctgtgtctctgggcgagagggccaccatcaactgcaagtccagccagagtgttttattcagctccaacaaaaagaactacttagcttggtaccagcagaaaccaggacagccccctaagctgctcatttactgggcatctacccgggaatccggggtccctgaccgattcagtggcagcgggtctgggacagatttcactctcaccatcagcagcctgcaggctgaagatgtggcagtttattactgtcagcaatataatagtactccgtggacgttcggccaagggaccaaggtggagatcaaacgtacggtggctgcaccatctgtcttcatcttcccgccatctgatgagcagttgaaatctggaactgcctctgttgtgtgcctgctgaataacttctatcccagagaggccaaagtacagtggaaggtggataacgccctccaatcgggtaactcccaggagagtgtcacagagcaggacagcaaggacagcacctacagcctcagcagcaccctgacgctgagcaaagcagactacgagaaacacaaagtctacgcctgcgaagtcacccatcagggcctgagctcgcccgtcacaaagagcttcaacaggggagagtgt

SEQ ID NO: 569 - DNA, 1353 bp, synthetic construct
  misc_feature 1..1353: note = Description of Artificial Sequence: Synthetic polynucleotide
  source 1..1353: mol_type = other DNA
caggtacagctgcagcagtcaggtccaggactggtgaagccctcgcagaccctctcactcacctgtgtcatctccggggacagtgtctctagcaacagagctgcctggaactggatcaggcagtccccatcgagaggccttgagtggctgggaaggacatactacaggtccaagtggtataatgattatgcagtttctgtgaaaagtcgaataaccatcaattcagacacatccaagaaccagatctccctgcagttgaactctgtgactcccgaggacacggctgtgtattactgtgcaagagtgagaccggggatcccttttgactactggggccagggaaccacggtcaccgtctcctcagcctccaccaagggcccatcggtcttccccctggcaccctcctccaagagcacctctgggggcacagcggccctgggctgcctggtcaaggactacttccccgaaccggtgacggtgtcgtggaactcaggcgccctgaccagcggcgtgcacaccttcccggctgtcctacagtcctcaggactctactccctcagcagcgtggtgaccgtgccctccagcagcttgggcacccagacctacatctgcaacgtgaatcacaagcccagcaacaccaaggtggacaagaaagttgagcccaaatcttgtgacaaaactcacacatgcccaccgtgcccagcacctgaactcctggggggaccgtcagtcttcctcttccccccaaaacccaaggacaccctcatgatctcccggacccctgaggtcacatgcgtggtggtggacgtgagccacgaagaccctgaggtcaagttcaactggtacgtggacggcgtggaggtgcataatgccaagacaaagccgcgggaggagcagtacaacagcacgtaccgtgtggtcagcgtcctcaccgtcctgcaccaggactggctgaatggcaaggagtacaagtgcaaggtctccaacaaagccctcccagcccccatcgagaaaaccatctccaaagccaaagggcagccccgagaaccacaggtgtacaccctgcccccatcccgggaggagatgaccaagaaccaggtcagcctgacctgcctggtcaaaggcttctatcccagcgacatcgccgtggagtgggagagcaatgggcagccggagaacaactacaagaccacgcctcccgtgctggactccgacggctccttcttcctctacagcaagctcaccgtggacaagagcaggtggcagcaggggaacgtcttctcatgctccgtgatgcatgaggctctgcacaaccactacacgcagaagagcctctccctgtctccgggtaaa

SEQ ID NO: 570 - DNA, 660 bp, synthetic construct
  misc_feature 1..660: note = Description of Artificial Sequence: Synthetic polynucleotide
  source 1..660: mol_type = other DNA
gacatccagatgacccagtctccagactccctggctgtgtctctgggcgagagggccaccatcaactgcgagtccagccagagtgttttattcagctccaacaaaaagaactacttagcttggtaccagcagaaaccaggacagccccctaagctgctcatttactgggcatctacccgggaatccggggtccctgaccgattcagtggcagcgggtctgggacagatttcactctcaccatcaaccgcctgcaggctgaagatgtggcagtttattactgtcagcaatataatagtactccgtggacgttcggccaagggaccaaggtggagatcaaacgtacggtggctgcaccatctgtcttcatcttcccgccatctgatgagcagttgaaatctggaactgcctctgttgtgtgcctgctgaataacttctatcccagagaggccaaagtacagtggaaggtggataacgccctccaatcgggtaactcccaggagagtgtcacagagcaggacagcaaggacagcacctacagcctcagcagcaccctgacgctgagcaaagcagactacgagaaacacaaagtctacgcctgcgaagtcacccatcagggcctgagctcgcccgtcacaaagagcttcaacaggggagagtgt

SEQ ID NO: 571 - DNA, 1350 bp, synthetic construct
  misc_feature 1..1350: note = Description of Artificial Sequence: Synthetic polynucleotide
  source 1..1350: mol_type = other DNA
gaggtgcagctgttggagtctgggggaggcttggtacagcctggggggtccctgagactctcctgtgcagcctctggattcacctttagcagctatgccatgcactgggtccgccaggccccagggaaggggctggactgggtctcaggtattagtggtagtggctttagcacatactatgtagactccgtgaagggccggttcaccatctccagagacaattccaagcacacgctgtatctgcaaatgaacagcctgagagccgaggacacggccgtatattactgtgcgaaagataatttagtggctggtaccgtctttgactactggggccagggaaccctggtcaccgtctcctcagcctccaccaagggcccatcggtcttccccctggcaccctcctccaagagcacctctgggggcacagcggccctgggctgcctggtcaaggactacttccccgaaccggtgacggtgtcgtggaactcaggcgccctgaccagcggcgtgcacaccttcccggctgtcctacagtcctcaggactctactccctcagcagcgtggtgaccgtgccctccagcagcttgggcacccagacctacatctgcaacgtgaatcacaagcccagcaacaccaaggtggacaagaaagttgagcccaaatcttgtgacaaaactcacacatgcccaccgtgcccagcacctgaactcctggggggaccgtcagtcttcctcttccccccaaaacccaaggacaccctcatgatctcccggacccctgaggtcacatgcgtggtggtggacgtgagccacgaagaccctgaggtcaagttcaactggtacgtggacggcgtggaggtgcataatgccaagacaaagccgcgggaggagcagtacaacagcacgtaccgtgtggtcagcgtcctcaccgtcctgcaccaggactggctgaatggcaaggagtacaagtgcaaggtctccaacaaagccctcccagcccccatcgagaaaaccatctccaaagccaaagggcagccccgagaaccacaggtgtacaccctgcccccatcccgggaggagatgaccaagaaccaggtcagcctgacctgcctggtcaaaggcttctatcccagcgacatcgccgtggagtgggagagcaatgggcagccggagaacaactacaagaccacgcctcccgtgctggactccgacggctccttcttcctctacagcaagctcaccgtggacaagagcaggtggcagcaggggaacgtcttctcatgctccgtgatgcatgaggctctgcacaaccactacacgcagaagagcctctccctgtctccgggtaaa

SEQ ID NO: 572 - DNA, 642 bp, synthetic construct
  misc_feature 1..642: note = Description of Artificial Sequence: Synthetic polynucleotide
  source 1..642: mol_type = other DNA
gacatccagatgacccagtctccttccaccctgtctgcatctgtaggagacagagtcaccatcacttgccgggccagtcagagtattagtagctggttggcctggtatcagcagaaaccagggaaagcccctaagctcctgatctataaggcgtctagtttagaaagtggggtcccatcaaggttcagcggcagtggatctgggacagaattcactctcaccatcagcagcctgcagcctgatgattttgcaacttattactgccaacagtataatagttattcgctcactttcggcggagggaccaaggtggatatcaaacgtacggtggctgcaccatctgtcttcatcttcccgccatctgatgagcagttgaaatctggaactgcctctgttgtgtgcctgctgaataacttctatcccagagaggccaaagtacagtggaaggtggataacgccctccaatcgggtaactcccaggagagtgtcacagagcaggacagcaaggacagcacctacagcctcagcagcaccctgacgctgagcaaagcagactacgagaaacacaaagtctacgcctgcgaagtcacccatcagggcctgagctcgcccgtcacaaagagcttcaacaggggagagtgt

SEQ ID NO: 573 - DNA, 1362 bp, synthetic construct
  misc_feature 1..1362: note = Description of Artificial Sequence: Synthetic polynucleotide
  source 1..1362: mol_type = other DNA
caagtacaactgcaacaaagtggtcctgggctcgtgaagccttcccagactctcagcctcacatgcgctataagtggggattctgtttcctcaaattcagcagcctggaattggatacgacagtctccatcccgtggccttgagtggcttggtagaacttattaccgatccaagtggtacaatgattacgccgtttcagtgaagtcccgcattactattaatcccgacacatctaagaatcaaatttcattgcaactgaatagcgtaacacccgaagatacagcagtttattattgtgcaggtgatcgacgctacggcatagtgggacttcctttcgcctattggggccaagggacactggtcactgtgtcatccgcctccaccaagggcccatcggtcttccccctggcaccctcctccaagagcacctctgggggcacagcggccctgggctgcctggtcaaggactacttccccgaaccggtgacggtgtcgtggaactcaggcgccctgaccagcggcgtgcacaccttcccggctgtcctacagtcctcaggactctactccctcagcagcgtggtgaccgtgccctccagcagcttgggcacccagacctacatctgcaacgtgaatcacaagcccagcaacaccaaggtggacaagaaagttgagcccaaatcttgtgacaaaactcacacatgtccaccgtgcccagcacctgaactgctggggggaccgtcagtcttcctcttccccccaaaacccaaggacaccctcatgatctcccggacccctgaggtcacatgcgtggtggtggacgtgagccacgaagaccctgaggtcaagttcaactggtacgtggacggcgtggaggtgcataatgccaagacaaagccgcgggaggagcagtacaacagcacgtaccgtgtggtcagcgtcctcaccgtcctgcaccaggactggctgaatggcaaggagtacaagtgcaaggtctccaacaaagccctcccagcccccatcgagaaaaccatctccaaagccaaagggcagccccgagaaccacaggtgtacaccctgcccccatcccgggaggagatgaccaagaaccaggtcagcctgacctgcctggtcaaaggcttctatcccagcgacatcgccgtggagtgggagagcaatgggcagccggagaacaactacaagaccacgcctcccgtgctggactccgacggctccttcttcctctacagcaagctcaccgtggacaagtctagatggcagcaggggaacgtcttctcatgctccgtgatgcatgaggctctgcacaaccactacacgcagaagagcctctccctgtctccgggt

SEQ ID NO: 574 - DNA, 660 bp, synthetic construct
  misc_feature 1..660: note = Description of Artificial Sequence: Synthetic polynucleotide
  source 1..660: mol_type = other DNA
gacatcgtaatgacacagtcaccagattcattggcagttagtctgggtgaaagggcaacaatcaactgcaagtcttctcagagtgtactgcatagttctaacaataagaactaccttacctggtttcaacagaaaccaggtcagccccccaagttgctgatttactgggcaagcacccgcgaatccggcgttcccgatcgattttcaggttccgggagtgggaccgactttaccttgaccatctcttccttgcaggccgaagatgtagccgtctattactgccatcagtattactctactccccccacattcggtcaaggtacaaaagttgagataaaacggacagtggccgctccttccgtgttcatcttcccaccttccgacgagcagctgaagtccggcacagcttctgtcgtgtgcctgctgaacaacttctaccctcgggaagccaaggtgcagtggaaggtggacaatgccctgcagtccggcaactcccaagagtctgtgaccgagcaggactccaaggacagcacctacagcctgtcctccacactgaccctgtccaaggccgactacgagaagcacaaggtgtacgcctgcgaagtgacccatcagggcctgtctagccctgtgaccaagtctttcaaccggggcgagtgt

SEQ ID NO: 575 - DNA, 1347 bp, synthetic construct
  misc_feature 1..1347: note = Description of Artificial Sequence: Synthetic polynucleotide
  source 1..1347: mol_type = other DNA
gaggtgcaactccttgaatcaggcggaggactcgtccaacctggagggagtcttaggcttagctgtgcagccagtggctttacttttagcagctatgcaatgcactgggtcaggcaggctcctggtaaggggctcgaatgggtcagcggcatatccgggtcaggtttctctacatattatgtcgattctgtaaaaggacgattcaccatatccagagacaattctaaaaataccttgtatctccagatgaacagcctgagagcagaagataccgcagtttattactgtgcaaaggataatctggttgccgggacagtttttgattattgggggcaaggcaccctcgtcacagtatccagtgcctccaccaagggcccatcggtcttccccctggcaccctcctccaagagcacctctgggggcacagcggccctgggctgcctggtcaaggactacttccccgaaccggtgacggtgtcgtggaactcaggcgccctgaccagcggcgtgcacaccttcccggctgtcctacagtcctcaggactctactccctcagcagcgtggtgaccgtgccctccagcagcttgggcacccagacctacatctgcaacgtgaatcacaagcccagcaacaccaaggtggacaagaaagttgagcccaaatcttgtgacaaaactcacacatgtccaccgtgcccagcacctgaactgctggggggaccgtcagtcttcctcttccccccaaaacccaaggacaccctcatgatctcccggacccctgaggtcacatgcgtggtggtggacgtgagccacgaagaccctgaggtcaagttcaactggtacgtggacggcgtggaggtgcataatgccaagacaaagccgcgggaggagcagtacaacagcacgtaccgtgtggtcagcgtcctcaccgtcctgcaccaggactggctgaatggcaaggagtacaagtgcaaggtctccaacaaagccctcccagcccccatcgagaaaaccatctccaaagccaaagggcagccccgagaaccacaggtgtacaccctgcccccatcccgggaggagatgaccaagaaccaggtcagcctgacctgcctggtcaaaggcttctatcccagcgacatcgccgtggagtgggagagcaatgggcagccggagaacaactacaagaccacgcctcccgtgctggactccgacggctccttcttcctctacagcaagctcaccgtggacaagtctagatggcagcaggggaacgtcttctcatgctccgtgatgcatgaggctctgcacaaccactacacgcagaagagcctctccctgtctccgggt

SEQ ID NO: 576 - DNA, 642 bp, synthetic construct
  misc_feature 1..642: note = Description of Artificial Sequence: Synthetic polynucleotide
  source 1..642: mol_type = other DNA
gatattcagatgactcaatcaccttcaacccttagcgcctccgttggagatcgcgttaccattacctgccgagcctcccaaagtatcagctcatggttggcatggtatcaacagaagcctggaaaggcacccaaacttctgatttacaaagccagctccttggagtcaggagtcccaagccggttcagcggatctgggtcagggacagaatttaccctgaccatatcttcccttcagcccgacgacttcgccacttactattgtcagcaatacaactcctattccctgactttcggcggtggcacaaaggttgacatcaagcggacagtggccgctccttccgtgttcatcttcccaccttccgacgagcagctgaagtccggcacagcttctgtcgtgtgcctgctgaacaacttctaccctcgggaagccaaggtgcagtggaaggtggacaatgccctgcagtccggcaactcccaagagtctgtgaccgagcaggactccaaggacagcacctacagcctgtcctccacactgaccctgtccaaggccgactacgagaagcacaaggtgtacgcctgcgaagtgacccatcagggcctgtctagccctgtgaccaagtctttcaaccggggcgagtgt

SEQ ID NO: 577 - DNA, 1350 bp, synthetic construct
  misc_feature 1..1350: note = Description of Artificial Sequence: Synthetic polynucleotide
  source 1..1350: mol_type = other DNA
caggtgcagcttcaacagagcggacctggtctggttaagccttcccaaaccctgagcctgacttgtgctatttccggggatagtgttagctccaatagggcagcatggaactggatcagacagtccccaagccgtggacttgagtggcttggacgtacttattacaggagtaaatggtacaatgattatgccgtttctgtgaagagccgtattactataaacccagatacttctaaaaatcaaatttcccttcagctcaactcagttacaccagaggatactgcagtctattattgcgcaagagttcgacctggcattcccttcgattattgggggcaggggacacccgttactgtgtcctcagcctccaccaagggcccatcggtcttccccctggcaccctcctccaagagcacctctgggggcacagcggccctgggctgcctggtcaaggactacttccccgaaccggtgacggtgtcgtggaactcaggcgccctgaccagcggcgtgcacaccttcccggctgtcctacagtcctcaggactctactccctcagcagcgtggtgaccgtgccctccagcagcttgggcacccagacctacatctgcaacgtgaatcacaagcccagcaacaccaaggtggacaagaaagttgagcccaaatcttgtgacaaaactcacacatgtccaccgtgcccagcacctgaactgctggggggaccgtcagtcttcctcttccccccaaaacccaaggacaccctcatgatctcccggacccctgaggtcacatgcgtggtggtggacgtgagccacgaagaccctgaggtcaagttcaactggtacgtggacggcgtggaggtgcataatgccaagacaaagccgcgggaggagcagtacaacagcacgtaccgtgtggtcagcgtcctcaccgtcctgcaccaggactggctgaatggcaaggagtacaagtgcaaggtctccaacaaagccctcccagcccccatcgagaaaaccatctccaaagccaaagggcagccccgagaaccacaggtgtacaccctgcccccatcccgggaggagatgaccaagaaccaggtcagcctgacctgcctggtcaaaggcttctatcccagcgacatcgccgtggagtgggagagcaatgggcagccggagaacaactacaagaccacgcctcccgtgctggactccgacggctccttcttcctctacagcaagctcaccgtggacaagtctagatggcagcaggggaacgtcttctcatgctccgtgatgcatgaggctctgcacaaccactacacgcagaagagcctctccctgtctccgggt

SEQ ID NO: 578 - DNA, 660 bp, synthetic construct
  misc_feature 1..660: note = Description of Artificial Sequence: Synthetic polynucleotide
  source 1..660: mol_type = other DNA
gatattgttatgacacagtccccagattcattggcagtaagcctcggtgaacgggctactattaactgtaagtcttcccagagtgtattgttctcttcaaataacaaaaactacctggcatggtatcagcaaaagcctggtcaaccccctaaacttctcatatactgggcatccactcgggagagcggtgtgccagaccgtttctcagggagtgtgtcaggtacagattttacactcacaatttccagcctccaagccgaagacgttgcagtatattattgccaacaatatcactctacaccttggacatttggtcaaggtactaaagtcgaaatcaaacggacagtggccgctccttccgtgttcatcttcccaccttccgacgagcagctgaagtccggcacagcttctgtcgtgtgcctgctgaacaacttctaccctcgggaagccaaggtgcagtggaaggtggacaatgccctgcagtccggcaactcccaagagtctgtgaccgagcaggactccaaggacagcacctacagcctgtcctccacactgaccctgtccaaggccgactacgagaagcacaaggtgtacgcctgcgaagtgacccatcagggcctgtctagccctgtgaccaagtctttcaaccggggcgagtgt

SEQ ID NO: 579 - protein, 258 aa, synthetic construct
  REGION 1..258: note = Description of Artificial Sequence: Synthetic polypeptide
QVQLQQSGPGLVKPSQTLSLTCAISGDSVSSNSAAWNWIRQSPSRGLEWLGRTYYRSKWYNDYAVSVKSRITINPDTSKNQISLQLNSVTPEDTAVYYCAGDRRYGIVGLPFAYWGQGTLVTVSSGGSEGKSSGSGSESKSTGGSDIVMTQSPDSLAVSLGERATINCKSSQSVLHSSNNKNYLTWFQQKPGQPPKLLIYWASTRESGVPDRFSGSGSGTDFTLTISSLQAEDVAVYYCHQYYSTPPTFGQGTKVEIK

SEQ ID NO: 580 - protein, 258 aa, synthetic construct
  REGION 1..258: note = Description of Artificial Sequence: Synthetic polypeptide
DIVMTQSPDSLAVSLGERATINCKSSQSVLHSSNNKNYLTWFQQKPGQPPKLLIYWASTRESGVPDRFSGSGSGTDFTLTISSLQAEDVAVYYCHQYYSTPPTFGQGTKVEIKGGSEGKSSGSGSESKSTGGSQVQLQQSGPGLVKPSQTLSLTCAISGDSVSSNSAAWNWIRQSPSRGLEWLGRTYYRSKWYNDYAVSVKSRITINPDTSKNQISLQLNSVTPEDTAVYYCAGDRRYGIVGLPFAYWGQGTLVTVSS

SEQ ID NO: 581 - protein, 256 aa, synthetic construct
  REGION 1..256: note = Description of Artificial Sequence: Synthetic polypeptide
QVQLQQSGPGLVKPSQTLSLTCAISGDSVSNNSAAWNWIRQSPSRGLEWLGRTYYRSKWYNDYAVSVKSRITINPDTSKNQFSLQLNSVTPEDTAVYYCARYGSGTLLFDYWGQGTLVTVSSGGSEGKSSGSGSESKSTGGSDIVMTQSPDSLAVSLGERATINCKSSQSVLYSSKNKNYLAWYQQKPGQPPKLLIYWASTRESGVPDRFSGSGSGTDFTLTISSLQAEDVAVYYCQQYYSTFPYTFGQGTKLEIK

SEQ ID NO: 582 - protein, 256 aa, synthetic construct
  REGION 1..256: note = Description of Artificial Sequence: Synthetic polypeptide
DIVMTQSPDSLAVSLGERATINCKSSQSVLYSSKNKNYLAWYQQKPGQPPKLLIYWASTRESGVPDRFSGSGSGTDFTLTISSLQAEDVAVYYCQQYYSTFPYTFGQGTKLEIKGGSEGKSSGSGSESKSTGGSQVQLQQSGPGLVKPSQTLSLTCAISGDSVSNNSAAWNWIRQSPSRGLEWLGRTYYRSKWYNDYAVSVKSRITINPDTSKNQFSLQLNSVTPEDTAVYYCARYGSGTLLFDYWGQGTLVTVSS

SEQ ID NO: 583 - protein, 258 aa, synthetic construct
  REGION 1..258: note = Description of Artificial Sequence: Synthetic polypeptide
QVQLQQSGPGLVRPSQTLSVTCAISGDSVSSNSASWNWIRQSPSRGLEWLGRTYYRSEWFNDYAVSVKSRVTINPDTSKNQLSLQLNSVIPEDTAVYYCAREARIGVAGKGFDYWGQGTLVTVSSGGSEGKSSGSGSESKSTGGSDIVMTQSPDSLAVSLGERATINCKSSQSVLFRSNNKNYLAWFQQKPGQPPKLLIYWASTRESGVPDRFSGSGSGTDFTLTISSLQAEDVAVYYCQQYYSTPRTFGQGTKVEIK

SEQ ID NO: 584 - protein, 258 aa, synthetic construct
  REGION 1..258: note = Description of Artificial Sequence: Synthetic polypeptide
DIVMTQSPDSLAVSLGERATINCKSSQSVLFRSNNKNYLAWFQQKPGQPPKLLIYWASTRESGVPDRFSGSGSGTDFTLTISSLQAEDVAVYYCQQYYSTPRTFGQGTKVEIKGGSEGKSSGSGSESKSTGGSQVQLQQSGPGLVRPSQTLSVTCAISGDSVSSNSASWNWIRQSPSRGLEWLGRTYYRSEWFNDYAVSVKSRVTINPDTSKNQLSLQLNSVIPEDTAVYYCAREARIGVAGKGFDYWGQGTLVTVSS

SEQ ID NO: 585 - protein, 254 aa, synthetic construct
  REGION 1..254: note = Description of Artificial Sequence: Synthetic polypeptide
QVQLQQSGPGLVKPSQTLSLTCAISGDSVSSNRAAWNWIRQTPSRGLEWLGRTYYRSEWYNDYAVSVKSRITINPDTSKNQFSLQLNSVTPEDTAVYYCARVRAAVPFDYWGQGTLVTVSSGGSEGKSSGSGSESKSTGGSDIVMTQSPDSLAVSLGERATINCKSSQSVLFSSNNKNYLAWYQQKPGQPPNLLIYWASTRESGVPDRFSGSVSGTDFTLTISSLQAEDVAIYYCQQYHSTPWTFGQGTKVEIK

SEQ ID NO: 586 - protein, 254 aa, synthetic construct
  REGION 1..254: note = Description of Artificial Sequence: Synthetic polypeptide
DIVMTQSPDSLAVSLGERATINCKSSQSVLFSSNNKNYLAWYQQKPGQPPNLLIYWASTRESGVPDRFSGSVSGTDFTLTISSLQAEDVAIYYCQQYHSTPWTFGQGTKVEIKGGSEGKSSGSGSESKSTGGSQVQLQQSGPGLVKPSQTLSLTCAISGDSVSSNRAAWNWIRQTPSRGLEWLGRTYYRSEWYNDYAVSVKSRITINPDTSKNQFSLQLNSVTPEDTAVYYCARVRAAVPFDYWGQGTLVTVSS

SEQ ID NO: 587 - protein, 252 aa, synthetic construct
  REGION 1..252: note = Description of Artificial Sequence: Synthetic polypeptide
QLQLQESGPGLVKPSETLSLMCTVSGGSITSSSYYWGWIRQPPGKGLEWIGNIYYSGTTYYNPSLKSRVTISVDTSKNQFSLKLSSVTAADTAVYYCAAGARDFDSWGQGSLVTVSSGGSEGKSSGSGSESKSTGGSDIVMTQSPDSLAVSLGERATINCKSSQSVLYSSSNKSYLAWYQQRPGQPPKLLIYWASTRESGVPDRFSGSGSGTDFTLTISSLQAEDVAVYYCQQYYSTPRMYTFGQGTKLEIK

SEQ ID NO: 588 - protein, 252 aa, synthetic construct
  REGION 1..252: note = Description of Artificial Sequence: Synthetic polypeptide
DIVMTQSPDSLAVSLGERATINCKSSQSVLYSSSNKSYLAWYQQRPGQPPKLLIYWASTRESGVPDRFSGSGSGTDFTLTISSLQAEDVAVYYCQQYYSTPRMYTFGQGTKLEIKGGSEGKSSGSGSESKSTGGSQLQLQESGPGLVKPSETLSLMCTVSGGSITSSSYYWGWIRQPPGKGLEWIGNIYYSGTTYYNPSLKSRVTISVDTSKNQFSLKLSSVTAADTAVYYCAAGARDFDSWGQGSLVTVSS

SEQ ID NO: 589 - protein, 254 aa, synthetic construct
  REGION 1..254: note = Description of Artificial Sequence: Synthetic polypeptide
EVQLLESGPGLVKPSQTLSLTCVISGDSVSSNRAAWNWIRQSPSRGLEWLGRTYYRSKWYNDYAVSVKSRITINSDTSKNQISLQLNSVTPEDTAVYYCARVRPGIPFDYWGQGTPVTVSSGGSEGKSSGSGSESKSTGGSDIVMTQSPDSLAVSLGERATINCKSSQSVLFSSNKKNYLAWYQQKPGQPPKLLIYWASTRESGVPDRFSGSGSGTDFTLTISSLQAEDVAVYYCQQYNSTPWTFGQGTKVEIK

SEQ ID NO: 590 - protein, 254 aa, synthetic construct
  REGION 1..254: note = Description of Artificial Sequence: Synthetic polypeptide
DIVMTQSPDSLAVSLGERATINCKSSQSVLFSSNKKNYLAWYQQKPGQPPKLLIYWASTRESGVPDRFSGSGSGTDFTLTISSLQAEDVAVYYCQQYNSTPWTFGQGTKVEIKGGSEGKSSGSGSESKSTGGSEVQLLESGPGLVKPSQTLSLTCVISGDSVSSNRAAWNWIRQSPSRGLEWLGRTYYRSKWYNDYAVSVKSRITINSDTSKNQISLQLNSVTPEDTAVYYCARVRPGIPFDYWGQGTPVTVSS

SEQ ID NO: 591 - protein, 254 aa, synthetic construct
  REGION 1..254: note = Description of Artificial Sequence: Synthetic polypeptide
QVQLQQSGPGLVKPSQTLSLTCVISGDSVSSNRAAWNWIRQSPSRGLEWLGRTYYRSKWYNDYAVSVKSRITINSDTSKNQISLQLNSVTPEDTAVYYCARVRPGIPFDYWGQGTTVTVSSGGSEGKSSGSGSESKSTGGSDIQMTQSPDSLAVSLGERATINCESSQSVLFSSNKKNYLAWYQQKPGQPPKLLIYWASTRESGVPDRFSGSGSGTDFTLTINRLQAEDVAVYYCQQYNSTPWTFGQGTKVEIK

SEQ ID NO: 592 - protein, 254 aa, synthetic construct
  REGION 1..254: note = Description of Artificial Sequence: Synthetic polypeptide
DIQMTQSPDSLAVSLGERATINCESSQSVLFSSNKKNYLAWYQQKPGQPPKLLIYWASTRESGVPDRFSGSGSGTDFTLTINRLQAEDVAVYYCQQYNSTPWTFGQGTKVEIKGGSEGKSSGSGSESKSTGGSQVQLQQSGPGLVKPSQTLSLTCVISGDSVSSNRAAWNWIRQSPSRGLEWLGRTYYRSKWYNDYAVSVKSRITINSDTSKNQISLQLNSVTPEDTAVYYCARVRPGIPFDYWGQGTTVTVSS

SEQ ID NO: 593 - protein, 247 aa, synthetic construct
  REGION 1..247: note = Description of Artificial Sequence: Synthetic polypeptide
EVQLLESGGGLVQPGGSLRLSCAASGFTFSSYAMHWVRQAPGKGLDWVSGISGSGFSTYYVDSVKGRFTISRDNSKHTLYLQMNSLRAEDTAVYYCAKDNLVAGTVFDYWGQGTLVTVSSGGSEGKSSGSGSESKSTGGSDIQMTQSPSTLSASVGDRVTITCRASQSISSWLAWYQQKPGKAPKLLIYKASSLESGVPSRFSGSGSGTEFTLTISSLQPDDFATYYCQQYNSYSLTFGGGTKVDIK

SEQ ID NO: 594 - protein, 247 aa, synthetic construct
  REGION 1..247: note = Description of Artificial Sequence: Synthetic polypeptide
DIQMTQSPSTLSASVGDRVTITCRASQSISSWLAWYQQKPGKAPKLLIYKASSLESGVPSRFSGSGSGTEFTLTISSLQPDDFATYYCQQYNSYSLTFGGGTKVDIKGGSEGKSSGSGSESKSTGGSEVQLLESGGGLVQPGGSLRLSCAASGFTFSSYAMHWVRQAPGKGLDWVSGISGSGFSTYYVDSVKGRFTISRDNSKHTLYLQMNSLRAEDTAVYYCAKDNLVAGTVFDYWGQGTLVTVSS

SEQ ID NO: 595 - protein, 258 aa, synthetic construct; identical to SEQ ID NO: 579
  REGION 1..258: note = Description of Artificial Sequence: Synthetic polypeptide

SEQ ID NO: 596 - protein, 258 aa, synthetic construct; identical to SEQ ID NO: 580
  REGION 1..258: note = Description of Artificial Sequence: Synthetic polypeptide

SEQ ID NO: 597 - protein, 247 aa, synthetic construct
  REGION 1..247: note = Description of Artificial Sequence: Synthetic polypeptide
EVQLLESGGGLVQPGGSLRLSCAASGFTFSSYAMHWVRQAPGKGLEWVSGISGSGFSTYYVDSVKGRFTISRDNSKNTLYLQMNSLRAEDTAVYYCAKDNLVAGTVFDYWGQGTLVTVSSGGSEGKSSGSGSESKSTGGSDIQMTQSPSTLSASVGDRVTITCRASQSISSWLAWYQQKPGKAPKLLIYKASSLESGVPSRFSGSGSGTEFTLTISSLQPDDFATYYCQQYNSYSLTFGGGTKVDIK

SEQ ID NO: 598 - protein, 247 aa, synthetic construct
  REGION 1..247: note = Description of Artificial Sequence: Synthetic polypeptide
DIQMTQSPSTLSASVGDRVTITCRASQSISSWLAWYQQKPGKAPKLLIYKASSLESGVPSRFSGSGSGTEFTLTISSLQPDDFATYYCQQYNSYSLTFGGGTKVDIKGGSEGKSSGSGSESKSTGGSEVQLLESGGGLVQPGGSLRLSCAASGFTFSSYAMHWVRQAPGKGLEWVSGISGSGFSTYYVDSVKGRFTISRDNSKNTLYLQMNSLRAEDTAVYYCAKDNLVAGTVFDYWGQGTLVTVSS

SEQ ID NO: 599 - protein, 254 aa, synthetic construct
  REGION 1..254: note = Description of Artificial Sequence: Synthetic polypeptide
QVQLQQSGPGLVKPSQTLSLTCAISGDSVSSNRAAWNWIRQSPSRGLEWLGRTYYRSKWYNDYAVSVKSRITINPDTSKNQISLQLNSVTPEDTAVYYCARVRPGIPFDYWGQGTPVTVSSGGSEGKSSGSGSESKSTGGSDIVMTQSPDSLAVSLGERATINCKSSQSVLFSSNNKNYLAWYQQKPGQPPKLLIYWASTRESGVPDRFSGSVSGTDFTLTISSLQAEDVAVYYCQQYHSTPWTFGQGTKVEIK

SEQ ID NO: 600 - protein, 254 aa, synthetic construct
  REGION 1..254: note = Description of Artificial Sequence: Synthetic polypeptide
DIVMTQSPDSLAVSLGERATINCKSSQSVLFSSNNKNYLAWYQQKPGQPPKLLIYWASTRESGVPDRFSGSVSGTDFTLTISSLQAEDVAVYYCQQYHSTPWTFGQGTKVEIKGGSEGKSSGSGSESKSTGGSQVQLQQSGPGLVKPSQTLSLTCAISGDSVSSNRAAWNWIRQSPSRGLEWLGRTYYRSKWYNDYAVSVKSRITINPDTSKNQISLQLNSVTPEDTAVYYCARVRPGIPFDYWGQGTPVTVSS

SEQ ID NO: 601 - protein, 490 aa, synthetic construct
  REGION 1..490: note = Description of Artificial Sequence: Synthetic polypeptide
QVQLQQSGPGLVKPSQTLSLTCAISGDSVSSNSAAWNWIRQSPSRGLEWLGRTYYRSKWYNDYAVSVKSRITINPDTSKNQISLQLNSVTPEDTAVYYCAGDRRYGIVGLPFAYWGQGTLVTVSSGGSEGKSSGSGSESKSTGGSDIVMTQSPDSLAVSLGERATINCKSSQSVLHSSNNKNYLTWFQQKPGQPPKLLIYWASTRESGVPDRFSGSGSGTDFTLTISSLQAEDVAVYYCHQYYSTPPTFGQGTKVEIKEPKSSDKTHTCPPCPAPEAAGGPSVFLFPPKPKDTLMISRTPEVTCVVVSVSHEDPEVKFNWYVDGVEVHNAKTKPREEQYNSTYRVVSVLTVLHQDWLNGKEYKCKVSNKALPAPIEKTISKAKGQPREPQVYVLPPSREEMTKNQVSLLCLVKGFYPSDIAVEWESNGQPENNYLTWPPVLDSDGSFFLYSKLTVDKSRWQQGNVFSCSVMHEALHNHYTQKSLSLSPGK

SEQ ID NO: 602 - protein, 490 aa, synthetic construct
  REGION 1..490: note = Description of Artificial Sequence: Synthetic polypeptide
DIVMTQSPDSLAVSLGERATINCKSSQSVLHSSNNKNYLTWFQQKPGQPPKLLIYWASTRESGVPDRFSGSGSGTDFTLTISSLQAEDVAVYYCHQYYSTPPTFGQGTKVEIKGGSEGKSSGSGSESKSTGGSQVQLQQSGPGLVKPSQTLSLTCAISGDSVSSNSAAWNWIRQSPSRGLEWLGRTYYRSKWYNDYAVSVKSRITINPDTSKNQISLQLNSVTPEDTAVYYCAGDRRYGIVGLPFAYWGQGTLVTVSSEPKSSDKTHTCPPCPAPEAAGGPSVFLFPPKPKDTLMISRTPEVTCVVVSVSHEDPEVKFNWYVDGVEVHNAKTKPREEQYNSTYRVVSVLTVLHQDWLNGKEYKCKVSNKALPAPIEKTISKAKGQPREPQVYVLPPSREEMTKNQVSLLCLVKGFYPSDIAVEWESNGQPENNYLTWPPVLDSDGSFFLYSKLTVDKSRWQQGNVFSCSVMHEALHNHYTQKSLSLSPGK

SEQ ID NO: 603 - protein, 488 aa, synthetic construct
  REGION 1..488: note = Description of Artificial Sequence: Synthetic polypeptide
QVQLQQSGPGLVKPSQTLSLTCAISGDSVSNNSAAWNWIRQSPSRGLEWLGRTYYRSKWYNDYAVSVKSRITINPDTSKNQFSLQLNSVTPEDTAVYYCARYGSGTLLFDYWGQGTLVTVSSGGSEGKSSGSGSESKSTGGSDIVMTQSPDSLAVSLGERATINCKSSQSVLYSSKNKNYLAWYQQKPGQPPKLLIYWASTRESGVPDRFSGSGSGTDFTLTISSLQAEDVAVYYCQQYYSTFPYTFGQGTKLEIKEPKSSDKTHTCPPCPAPEAAGGPSVFLFPPKPKDTLMISRTPEVTCVVVSVSHEDPEVKFNWYVDGVEVHNAKTKPREEQYNSTYRVVSVLTVLHQDWLNGKEYKCKVSNKALPAPIEKTISKAKGQPREPQVYVLPPSREEMTKNQVSLLCLVKGFYPSDIAVEWESNGQPENNYLTWPPVLDSDGSFFLYSKLTVDKSRWQQGNVFSCSVMHEALHNHYTQKSLSLSPGK

SEQ ID NO: 604 - protein, 488 aa, synthetic construct
  REGION 1..488: note = Description of Artificial Sequence: Synthetic polypeptide
DIVMTQSPDSLAVSLGERATINCKSSQSVLYSSKNKNYLAWYQQKPGQPPKLLIYWASTRESGVPDRFSGSGSGTDFTLTISSLQAEDVAVYYCQQYYSTFPYTFGQGTKLEIKGGSEGKSSGSGSESKSTGGSQVQLQQSGPGLVKPSQTLSLTCAISGDSVSNNSAAWNWIRQSPSRGLEWLGRTYYRSKWYNDYAVSVKSRITINPDTSKNQFSLQLNSVTPEDTAVYYCARYGSGTLLFDYWGQGTLVTVSSEPKSSDKTHTCPPCPAPEAAGGPSVFLFPPKPKDTLMISRTPEVTCVVVSVSHEDPEVKFNWYVDGVEVHNAKTKPREEQYNSTYRVVSVLTVLHQDWLNGKEYKCKVSNKALPAPIEKTISKAKGQPREPQVYVLPPSREEMTKNQVSLLCLVKGFYPSDIAVEWESNGQPENNYLTWPPVLDSDGSFFLYSKLTVDKSRWQQGNVFSCSVMHEALHNHYTQKSLSLSPGK

SEQ ID NO: 605 - protein, 490 aa, synthetic construct
  REGION 1..490: note = Description of Artificial Sequence: Synthetic polypeptide
QVQLQQSGPGLVRPSQTLSVTCAISGDSVSSNSASWNWIRQSPSRGLEWLGRTYYRSEWFNDYAVSVKSRVTINPDTSKNQLSLQLNSVIPEDTAVYYCAREARIGVAGKGFDYWGQGTLVTVSSGGSEGKSSGSGSESKSTGGSDIVMTQSPDSLAVSLGERATINCKSSQSVLFRSNNKNYLAWFQQKPGQPPKLLIYWASTRESGVPDRFSGSGSGTDFTLTISSLQAEDVAVYYCQQYYSTPRTFGQGTKVEIKEPKSSDKTHTCPPCPAPEAAGGPSVFLFPPKPKDTLMISRTPEVTCVVVSVSHEDPEVKFNWYVDGVEVHNAKTKPREEQYNSTYRVVSVLTVLHQDWLNGKEYKCKVSNKALPAPIEKTISKAKGQPREPQVYVLPPSREEMTKNQVSLLCLVKGFYPSDIAVEWESNGQPENNYLTWPPVLDSDGSFFLYSKLTVDKSRWQQGNVFSCSVMHEALHNHYTQKSLSLSPGK

SEQ ID NO: 606 - protein, 490 aa, synthetic construct
  REGION 1..490: note = Description of Artificial Sequence: Synthetic polypeptide
DIVMTQSPDSLAVSLGERATINCKSSQSVLFRSNNKNYLAWFQQKPGQPPKLLIYWASTRESGVPDRFSGSGSGTDFTLTISSLQAEDVAVYYCQQYYSTPRTFGQGTKVEIKGGSEGKSSGSGSESKSTGGSQVQLQQSGPGLVRPSQTLSVTCAISGDSVSSNSASWNWIRQSPSRGLEWLGRTYYRSEWFNDYAVSVKSRVTINPDTSKNQLSLQLNSVIPEDTAVYYCAREARIGVAGKGFDYWGQGTLVTVSSEPKSSDKTHTCPPCPAPEAAGGPSVFLFPPKPKDTLMISRTPEVTCVVVSVSHEDPEVKFNWYVDGVEVHNAKTKPREEQYNSTYRVVSVLTVLHQDWLNGKEYKCKVSNKALPAPIEKTISKAKGQPREPQVYVLPPSREEMTKNQVSLLCLVKGFYPSDIAVEWESNGQPENNYLTWPPVLDSDGSFFLYSKLTVDKSRWQQGNVFSCSVMHEALHNHYTQKSLSLSPGK

SEQ ID NO: 607 - protein, 486 aa, synthetic construct
  REGION 1..486: note = Description of Artificial Sequence: Synthetic polypeptide
QVQLQQSGPGLVKPSQTLSLTCAISGDSVSSNRAAWNWIRQTPSRGLEWLGRTYYRSEWYNDYAVSVKSRITINPDTSKNQFSLQLNSVTPEDTAVYYCARVRAAVPFDYWGQGTLVTVSSGGSEGKSSGSGSESKSTGGSDIVMTQSPDSLAVSLGERATINCKSSQSVLFSSNNKNYLAWYQQKPGQPPNLLIYWASTRESGVPDRFSGSVSGTDFTLTISSLQAEDVAIYYCQQYHSTPWTFGQGTKVEIKEPKSSDKTHTCPPCPAPEAAGGPSVFLFPPKPKDTLMISRTPEVTCVVVSVSHEDPEVKFNWYVDGVEVHNAKTKPREEQYNSTYRVVSVLTVLHQDWLNGKEYKCKVSNKALPAPIEKTISKAKGQPREPQVYVLPPSREEMTKNQVSLLCLVKGFYPSDIAVEWESNGQPENNYLTWPPVLDSDGSFFLYSKLTVDKSRWQQGNVFSCSVMHEALHNHYTQKSLSLSPGK

SEQ ID NO: 608 - protein, 486 aa, synthetic construct
  REGION 1..486: note = Description of Artificial Sequence: Synthetic polypeptide
DIVMTQSPDSLAVSLGERATINCKSSQSVLFSSNNKNYLAWYQQKPGQPPNLLIYWASTRESGVPDRFSGSVSGTDFTLTISSLQAEDVAIYYCQQYHSTPWTFGQGTKVEIKGGSEGKSSGSGSESKSTGGSQVQLQQSGPGLVKPSQTLSLTCAISGDSVSSNRAAWNWIRQTPSRGLEWLGRTYYRSEWYNDYAVSVKSRITINPDTSKNQFSLQLNSVTPEDTAVYYCARVRAAVPFDYWGQGTLVTVSSEPKSSDKTHTCPPCPAPEAAGGPSVFLFPPKPKDTLMISRTPEVTCVVVSVSHEDPEVKFNWYVDGVEVHNAKTKPREEQYNSTYRVVSVLTVLHQDWLNGKEYKCKVSNKALPAPIEKTISKAKGQPREPQVYVLPPSREEMTKNQVSLLCLVKGFYPSDIAVEWESNGQPENNYLTWPPVLDSDGSFFLYSKLTVDKSRWQQGNVFSCSVMHEALHNHYTQKSLSLSPGK

SEQ ID NO: 609 - protein, 484 aa, synthetic construct
  REGION 1..484: note = Description of Artificial Sequence: Synthetic polypeptide
QLQLQESGPGLVKPSETLSLMCTVSGGSITSSSYYWGWIRQPPGKGLEWIGNIYYSGTTYYNPSLKSRVTISVDTSKNQFSLKLSSVTAADTAVYYCAAGARDFDSWGQGSLVTVSSGGSEGKSSGSGSESKSTGGSDIVMTQSPDSLAVSLGERATINCKSSQSVLYSSSNKSYLAWYQQRPGQPPKLLIYWASTRESGVPDRFSGSGSGTDFTLTISSLQAEDVAVYYCQQYYSTPRMYTFGQGTKLEIKEPKSSDKTHTCPPCPAPEAAGGPSVFLFPPKPKDTLMISRTPEVTCVVVSVSHEDPEVKFNWYVDGVEVHNAKTKPREEQYNSTYRVVSVLTVLHQDWLNGKEYKCKVSNKALPAPIEKTISKAKGQPREPQVYVLPPSREEMTKNQVSLLCLVKGFYPSDIAVEWESNGQPENNYLTWPPVLDSDGSFFLYSKLTVDKSRWQQGNVFSCSVMHEALHNHYTQKSLSLSPGK

SEQ ID NO: 610 - protein, 484 aa, synthetic construct
  REGION 1..484: note = Description of Artificial Sequence: Synthetic polypeptide
DIVMTQSPDSLAVSLGERATINCKSSQSVLYSSSNKSYLAWYQQRPGQPPKLLIYWASTRESGVPDRFSGSGSGTDFTLTISSLQAEDVAVYYCQQYYSTPRMYTFGQGTKLEIKGGSEGKSSGSGSESKSTGGSQLQLQESGPGLVKPSETLSLMCTVSGGSITSSSYYWGWIRQPPGKGLEWIGNIYYSGTTYYNPSLKSRVTISVDTSKNQFSLKLSSVTAADTAVYYCAAGARDFDSWGQGSLVTVSSEPKSSDKTHTCPPCPAPEAAGGPSVFLFPPKPKDTLMISRTPEVTCVVVSVSHEDPEVKFNWYVDGVEVHNAKTKPREEQYNSTYRVVSVLTVLHQDWLNGKEYKCKVSNKALPAPIEKTISKAKGQPREPQVYVLPPSREEMTKNQVSLLCLVKGFYPSDIAVEWESNGQPENNYLTWPPVLDSDGSFFLYSKLTVDKSRWQQGNVFSCSVMHEALHNHYTQKSLSLSPGK

SEQ ID NO: 611 - protein, 486 aa, synthetic construct
  REGION 1..486: note = Description of Artificial Sequence: Synthetic polypeptide
EVQLLESGPGLVKPSQTLSLTCVISGDSVSSNRAAWNWIRQSPSRGLEWLGRTYYRSKWYNDYAVSVKSRITINSDTSKNQISLQLNSVTPEDTAVYYCARVRPGIPFDYWGQGTPVTVSSGGSEGKSSGSGSESKSTGGSDIVMTQSPDSLAVSLGERATINCKSSQSVLFSSNKKNYLAWYQQKPGQPPKLLIYWASTRESGVPDRFSGSGSGTDFTLTISSLQAEDVAVYYCQQYNSTPWTFGQGTKVEIKEPKSSDKTHTCPPCPAPEAAGGPSVFLFPPKPKDTLMISRTPEVTCVVVSVSHEDPEVKFNWYVDGVEVHNAKTKPREEQYNSTYRVVSVLTVLHQDWLNGKEYKCKVSNKALPAPIEKTISKAKGQPREPQVYVLPPSREEMTKNQVSLLCLVKGFYPSDIAVEWESNGQPENNYLTWPPVLDSDGSFFLYSKLTVDKSRWQQGNVFSCSVMHEALHNHYTQKSLSLSPGK

SEQ ID NO: 612 - protein, 486 aa, synthetic construct
  REGION 1..486: note = Description of Artificial Sequence: Synthetic polypeptide
DIVMTQSPDSLAVSLGERATINCKSSQSVLFSSNKKNYLAWYQQKPGQPPKLLIYWASTRESGVPDRFSGSGSGTDFTLTISSLQAEDVAVYYCQQYNSTPWTFGQGTKVEIKGGSEGKSSGSGSESKSTGGSEVQLLESGPGLVKPSQTLSLTCVISGDSVSSNRAAWNWIRQSPSRGLEWLGRTYYRSKWYNDYAVSVKSRITINSDTSKNQISLQLNSVTPEDTAVYYCARVRPGIPFDYWGQGTPVTVSSEPKSSDKTHTCPPCPAPEAAGGPSVFLFPPKPKDTLMISRTPEVTCVVVSVSHEDPEVKFNWYVDGVEVHNAKTKPREEQYNSTYRVVSVLTVLHQDWLNGKEYKCKVSNKALPAPIEKTISKAKGQPREPQVYVLPPSREEMTKNQVSLLCLVKGFYPSDIAVEWESNGQPENNYLTWPPVLDSDGSFFLYSKLTVDKSRWQQGNVFSCSVMHEALHNHYTQKSLSLSPGK

SEQ ID NO: 613 - protein, 486 aa, synthetic construct
  REGION 1..486: note = Description of Artificial Sequence: Synthetic polypeptide
QVQLQQSGPGLVKPSQTLSLTCVISGDSVSSNRAAWNWIRQSPSRGLEWLGRTYYRSKWYNDYAVSVKSRITINSDTSKNQISLQLNSVTPEDTAVYYCARVRPGIPFDYWGQGTTVTVSSGGSEGKSSGSGSESKSTGGSDIQMTQSPDSLAVSLGERATINCESSQSVLFSSNKKNYLAWYQQKPGQPPKLLIYWASTRESGVPDRFSGSGSGTDFTLTINRLQAEDVAVYYCQQYNSTPWTFGQGTKVEIKEPKSSDKTHTCPPCPAPEAAGGPSVFLFPPKPKDTLMISRTPEVTCVVVSVSHEDPEVKFNWYVDGVEVHNAKTKPREEQYNSTYRVVSVLTVLHQDWLNGKEYKCKVSNKALPAPIEKTISKAKGQPREPQVYVLPPSREEMTKNQVSLLCLVKGFYPSDIAVEWESNGQPENNYLTWPPVLDSDGSFFLYSKLTVDKSRWQQGNVFSCSVMHEALHNHYTQKSLSLSPGK

SEQ ID NO: 614 - protein, 486 aa, synthetic construct
  REGION 1..486: note = Description of Artificial Sequence: Synthetic polypeptide
DIQMTQSPDSLAVSLGERATINCESSQSVLFSSNKKNYLAWYQQKPGQPPKLLIYWASTRESGVPDRFSGSGSGTDFTLTINRLQAEDVAVYYCQQYNSTPWTFGQGTKVEIKGGSEGKSSGSGSESKSTGGSQVQLQQSGPGLVKPSQTLSLTCVISGDSVSSNRAAWNWIRQSPSRGLEWLGRTYYRSKWYNDYAVSVKSRITINSDTSKNQISLQLNSVTPEDTAVYYCARVRPGIPFDYWGQGTTVTVSSEPKSSDKTHTCPPCPAPEAAGGPSVFLFPPKPKDTLMISRTPEVTCVVVSVSHEDPEVKFNWYVDGVEVHNAKTKPREEQYNSTYRVVSVLTVLHQDWLNGKEYKCKVSNKALPAPIEKTISKAKGQPREPQVYVLPPSREEMTKNQVSLLCLVKGFYPSDIAVEWESNGQPENNYLTWPPVLDSDGSFFLYSKLTVDKSRWQQGNVFSCSVMHEALHNHYTQKSLSLSPGK

SEQ ID NO: 615 - protein, 479 aa, synthetic construct
  REGION 1..479: note = Description of Artificial Sequence: Synthetic polypeptide
EVQLLESGGGLVQPGGSLRLSCAASGFTFSSYAMHWVRQAPGKGLDWVSGISGSGFSTYYVDSVKGRFTISRDNSKHTLYLQMNSLRAEDTAVYYCAKDNLVAGTVFDYWGQGTLVTVSSGGSEGKSSGSGSESKSTGGSDIQMTQSPSTLSASVGDRVTITCRASQSISSWLAWYQQKPGKAPKLLIYKASSLESGVPSRFSGSGSGTEFTLTISSLQPDDFATYYCQQYNSYSLTFGGGTKVDIKEPKSSDKTHTCPPCPAPEAAGGPSVFLFPPKPKDTLMISRTPEVTCVVVSVSHEDPEVKFNWYVDGVEVHNAKTKPREEQYNSTYRVVSVLTVLHQDWLNGKEYKCKVSNKALPAPIEKTISKAKGQPREPQVYVLPPSREEMTKNQVSLLCLVKGFYPSDIAVEWESNGQPENNYLTWPPVLDSDGSFFLYSKLTVDKSRWQQGNVFSCSVMHEALHNHYTQKSLSLSPGK

SEQ ID NO: 616 - protein, 479 aa, synthetic construct
  REGION 1..479: note = Description of Artificial Sequence: Synthetic polypeptide
DIQMTQSPSTLSASVGDRVTITCRASQSISSWLAWYQQKPGKAPKLLIYKASSLESGVPSRFSGSGSGTEFTLTISSLQPDDFATYYCQQYNSYSLTFGGGTKVDIKGGSEGKSSGSGSESKSTGGSEVQLLESGGGLVQPGGSLRLSCAASGFTFSSYAMHWVRQAPGKGLDWVSGISGSGFSTYYVDSVKGRFTISRDNSKHTLYLQMNSLRAEDTAVYYCAKDNLVAGTVFDYWGQGTLVTVSSEPKSSDKTHTCPPCPAPEAAGGPSVFLFPPKPKDTLMISRTPEVTCVVVSVSHEDPEVKFNWYVDGVEVHNAKTKPREEQYNSTYRVVSVLTVLHQDWLNGKEYKCKVSNKALPAPIEKTISKAKGQPREPQVYVLPPSREEMTKNQVSLLCLVKGFYPSDIAVEWESNGQPENNYLTWPPVLDSDGSFFLYSKLTVDKSRWQQGNVFSCSVMHEALHNHYTQKSLSLSPGK

SEQ ID NO: 617 - protein, 490 aa, synthetic construct; identical to SEQ ID NO: 601
  REGION 1..490: note = Description of Artificial Sequence: Synthetic polypeptide

SEQ ID NO: 618 - protein, 490 aa, synthetic construct; identical to SEQ ID NO: 602
  REGION 1..490: note = Description of Artificial Sequence: Synthetic polypeptide

SEQ ID NO: 619 - protein, 479 aa, synthetic construct
  REGION 1..479: note = Description of Artificial Sequence: Synthetic polypeptide
EVQLLESGGGLVQPGGSLRLSCAASGFTFSSYAMHWVRQAPGKGLEWVSGISGSGFSTYYVDSVKGRFTISRDNSKNTLYLQMNSLRAEDTAVYYCAKDNLVAGTVFDYWGQGTLVTVSSGGSEGKSSGSGSESKSTGGSDIQMTQSPSTLSASVGDRVTITCRASQSISSWLAWYQQKPGKAPKLLIYKASSLESGVPSRFSGSGSGTEFTLTISSLQPDDFATYYCQQYNSYSLTFGGGTKVDIKEPKSSDKTHTCPPCPAPEAAGGPSVFLFPPKPKDTLMISRTPEVTCVVVSVSHEDPEVKFNWYVDGVEVHNAKTKPREEQYNSTYRVVSVLTVLHQDWLNGKEYKCKVSNKALPAPIEKTISKAKGQPREPQVYVLPPSREEMTKNQVSLLCLVKGFYPSDIAVEWESNGQPENNYLTWPPVLDSDGSFFLYSKLTVDKSRWQQGNVFSCSVMHEALHNHYTQKSLSLSPGK

SEQ ID NO: 620 - protein, 479 aa, synthetic construct
  REGION 1..479: note = Description of Artificial Sequence: Synthetic polypeptide
DIQMTQSPSTLSASVGDRVTITCRASQSISSWLAWYQQKPGKAPKLLIYKASSLESGVPSRFSGSGSGTEFTLTISSLQPDDFATYYCQQYNSYSLTFGGGTKVDIKGGSEGKSSGSGSESKSTGGSEVQLLESGGGLVQPGGSLRLSCAASGFTFSSYAMHWVRQAPGKGLEWVSGISGSGFSTYYVDSVKGRFTISRDNSKNTLYLQMNSLRAEDTAVYYCAKDNLVAGTVFDYWGQGTLVTVSSEPKSSDKTHTCPPCPAPEAAGGPSVFLFPPKPKDTLMISRTPEVTCVVVSVSHEDPEVKFNWYVDGVEVHNAKTKPREEQYNSTYRVVSVLTVLHQDWLNGKEYKCKVSNKALPAPIEKTISKAKGQPREPQVYVLPPSREEMTKNQVSLLCLVKGFYPSDIAVEWESNGQPENNYLTWPPVLDSDGSFFLYSKLTVDKSRWQQGNVFSCSVMHEALHNHYTQKSLSLSPGK

SEQ ID NO: 621 - protein, 486 aa, synthetic construct
  REGION 1..486: note = Description of Artificial Sequence: Synthetic polypeptide
QVQLQQSGPGLVKPSQTLSLTCAISGDSVSSNRAAWNWIRQSPSRGLEWLGRTYYRSKWYNDYAVSVKSRITINPDTSKNQISLQLNSVTPEDTAVYYCARVRPGIPFDYWGQGTPVTVSSGGSEGKSSGSGSESKSTGGSDIVMTQSPDSLAVSLGERATINCKSSQSVLFSSNNKNYLAWYQQKPGQPPKLLIYWASTRESGVPDRFSGSVSGTDFTLTISSLQAEDVAVYYCQQYHSTPWTFGQGTKVEIKEPKSSDKTHTCPPCPAPEAAGGPSVFLFPPKPKDTLMISRTPEVTCVVVSVSHEDPEVKFNWYVDGVEVHNAKTKPREEQYNSTYRVVSVLTVLHQDWLNGKEYKCKVSNKALPAPIEKTISKAKGQPREPQVYVLPPSREEMTKNQVSLLCLVKGFYPSDIAVEWESNGQPENNYLTWPPVLDSDGSFFLYSKLTVDKSRWQQGNVFSCSVMHEALHNHYTQKSLSLSPGK

SEQ ID NO: 622 - protein, 486 aa, synthetic construct
  REGION 1..486: note = Description of Artificial Sequence: Synthetic polypeptide
DIVMTQSPDSLAVSLGERATINCKSSQSVLFSSNNKNYLAWYQQKPGQPPKLLIYWASTRESGVPDRFSGSVSGTDFTLTISSLQAEDVAVYYCQQYHSTPWTFGQGTKVEIKGGSEGKSSGSGSESKSTGGSQVQLQQSGPGLVKPSQTLSLTCAISGDSVSSNRAAWNWIRQSPSRGLEWLGRTYYRSKWYNDYAVSVKSRITINPDTSKNQISLQLNSVTPEDTAVYYCARVRPGIPFDYWGQGTPVTVSSEPKSSDKTHTCPPCPAPEAAGGPSVFLFPPKPKDTLMISRTPEVTCVVVSVSHEDPEVKFNWYVDGVEVHNAKTKPREEQYNSTYRVVSVLTVLHQDWLNGKEYKCKVSNKALPAPIEKTISKAKGQPREPQVYVLPPSREEMTKNQVSLLCLVKGFYPSDIAVEWESNGQPENNYLTWPPVLDSDGSFFLYSKLTVDKSRWQQGNVFSCSVMHEALHNHYTQKSLSLSPGK

SEQ ID NO: 623 - DNA, 774 bp, synthetic construct
  misc_feature 1..774: note = Description of Artificial Sequence: Synthetic polynucleotide
  source 1..774: mol_type = other DNA
caggtgcagctgcagcagagcggccctggactggtgaagcccagccagaccctgagcctgacctgcgctatcagcggcgatagcgtgagctccaacagcgccgcctggaactggatcaggcagagccctagcaggggcctggaatggctgggcaggacctactacaggagcaagtggtacaacgactacgccgtgtccgtgaagagcaggatcaccatcaaccccgacaccagcaagaaccagatcagcctgcagctgaacagcgtgacccccgaggacaccgccgtgtactactgcgccggcgacagaaggtacggcatcgtgggcctgcctttcgcctactggggccagggaaccctggtgaccgtgagcagcggcggatctgagggaaagtccagcggctccggcagcgaaagcaagtccaccggcggaagcgacatcgtgatgacccagagccccgatagcctggctgtgagcctgggcgagagagccaccatcaactgcaagagcagccagagcgtgctgcacagcagcaacaacaagaactacctgacctggttccagcagaagcccggccagcctcccaagctgctgatctactgggctagcaccagagagtccggcgtgcctgacaggttcagcggaagcggcagcggcaccgacttcaccctgaccatcagcagcctgcaggccgaggacgtggccgtgtactactgccaccagtactacagcaccccccctacctttggccagggcaccaaggtggagatcaag

SEQ ID NO: 624 - DNA, 774 bp, synthetic construct
  misc_feature 1..774: note = Description of Artificial Sequence: Synthetic polynucleotide
  source 1..774: mol_type = other DNA
gacatcgtgatgacccagagccccgatagcctggctgtgagcctgggcgagagagccaccatcaactgcaagagcagccagagcgtgctgcacagcagcaacaacaagaactacctgacctggttccagcagaagcccggccagcctcccaagctgctgatctactgggctagcaccagagagtccggcgtgcctgacaggttcagcggaagcggcagcggcaccgacttcaccctgaccatcagcagcctgcaggccgaggacgtggccgtgtactactgccaccagtactacagcaccccccctacctttggccagggcaccaaggtggagatcaagggcggatctgagggaaagtccagcggctccggcagcgaaagcaagtccaccggcggaagccaggtgcagctgcagcagagcggccctggactggtgaagcccagccagaccctgagcctgacctgcgctatcagcggcgatagcgtgagctccaacagcgccgcctggaactggatcaggcagagccctagcaggggcctggaatggctgggcaggacctactacaggagcaagtggtacaacgactacgccgtgtccgtgaagagcaggatcaccatcaaccccgacaccagcaagaaccagatcagcctgcagctgaacagcgtgacccccgaggacaccgccgtgtactactgcgccggcgacagaaggtacggcatcgtgggcctgcctttcgcctactggggccagggaaccctggtgaccgtgagcagc

SEQ ID NO: 625 - DNA, 768 bp, synthetic construct
  misc_feature 1..768: note = Description of Artificial Sequence: Synthetic polynucleotide
  source 1..768: mol_type = other DNA
caggtgcagctgcagcagagcggacccggcctggtgaaacccagccagaccctgagcctgacctgcgccatcagcggcgacagcgtgagcaacaacagcgccgcctggaactggatcaggcagagccccagcagaggcctggaatggctgggcaggacctactacaggagcaagtggtacaacgactacgccgtgagcgtgaagagcaggatcaccatcaaccccgacacctccaagaaccagttcagcctgcagctgaacagcgtgacccccgaggacaccgccgtgtactactgcgccaggtatggcagcggcaccctgctgttcgactactggggccagggcaccctggtgacagtgagcagcggcggatctgagggaaagtccagcggctccggcagcgaaagcaagtccaccggcggaagcgacatcgtgatgacccagagccccgatagcctggctgtgagcctgggagagagggccaccatcaactgcaagagcagccagagcgtgctgtacagcagcaagaacaagaactacctggcctggtaccagcagaaacccggccagccccccaagctgctgatctactgggccagcacaagggaaagcggcgtgcccgacagattcagcggaagcggcagcggcaccgacttcaccctgaccatcagcagcctgcaggccgaggatgtggccgtgtactactgccagcagtactacagcaccttcccctacaccttcggccagggcaccaagctggagatcaag

SEQ ID NO: 626 - DNA, 768 bp, synthetic construct
  misc_feature 1..768: note = Description of Artificial Sequence: Synthetic polynucleotide
  source 1..768: mol_type = other DNA
gacatcgtgatgacccagagccccgatagcctggctgtgagcctgggagagagggccaccatcaactgcaagagcagccagagcgtgctgtacagcagcaagaacaagaactacctggcctggtaccagcagaaacccggccagccccccaagctgctgatctactgggccagcacaagggaaagcggcgtgcccgacagattcagcggaagcggcagcggcaccgacttcaccctgaccatcagcagcctgcaggccgaggatgtggccgtgtactactgccagcagtactacagcaccttcccctacaccttcggccagggcaccaagctggagatcaagggcggatctgagggaaagtccagcggctccggcagcgaaagcaagtccaccggcggaagccaggtgcagctgcagcagagcggacccggcctggtgaaacccagccagaccctgagcctgacctgcgccatcagcggcgacagcgtgagcaacaacagcgccgcctggaactggatcaggcagagccccagcagaggcctggaatggctgggcaggacctactacaggagcaagtggtacaacgactacgccgtgagcgtgaagagcaggatcaccatcaaccccgacacctccaagaaccagttcagcctgcagctgaacagcgtgacccccgaggacaccgccgtgtactactgcgccaggtatggcagcggcaccctgctgttcgactactggggccagggcaccctggtgacagtgagcagc

SEQ ID NO: 627 - DNA, 774 bp, synthetic construct
  misc_feature 1..774: note = Description of Artificial Sequence: Synthetic polynucleotide
  source 1..774: mol_type = other DNA
caggtgcagctgcagcagagcggacccggactggtgagacccagccagaccctgagcgtgacctgcgccatcagcggcgacagcgtgagcagcaacagcgccagctggaactggatcaggcagagccccagcagaggcctggagtggctgggaaggacatactacaggagcgagtggttcaacgactacgccgtgagcgtgaagagcagggtgaccatcaaccccgacaccagcaagaaccagctgagcctgcagctgaacagcgtgatccccgaggacaccgccgtgtactactgcgccagagaggccagaatcggcgtggccggcaaaggcttcgactactggggccagggcaccctggtgacagtgtccagcggcggatctgagggaaagtccagcggctccggcagcgaaagcaagtccaccggcggaagcgacatcgtgatgacccagagccctgactccctggctgtgagcctgggcgagagagccaccatcaactgcaagagcagccagagcgtgctgttcaggagcaacaacaagaactacctggcctggttccagcagaagcccggccagcctcccaagctgctgatctactgggccagcaccagagagagcggcgtgcccgatagatttagcggcagcggcagcggcaccgactttaccctgaccatcagctccctgcaggccgaggatgtggccgtgtactactgccagcagtactacagcacccccagaaccttcggccagggcaccaaggtggagatcaag

SEQ ID NO: 628 - DNA, 774 bp, synthetic construct
  misc_feature 1..774: note = Description of Artificial Sequence: Synthetic polynucleotide
  source 1..774: mol_type = other DNA
gacatcgtgatgacccagagccctgactccctggctgtgagcctgggcgagagagccaccatcaactgcaagagcagccagagcgtgctgttcaggagcaacaacaagaactacctggcctggttccagcagaagcccggccagcctcccaagctgctgatctactgggccagcaccagagagagcggcgtgcccgatagatttagcggcagcggcagcggcaccgactttaccctgaccatcagctccctgcaggccgaggatgtggccgtgtactactgccagcagtactacagcacccccagaaccttcggccagggcaccaaggtggagatcaagggcggatctgagggaaagtccagcggctccggcagcgaaagcaagtccaccggcggaagccaggtgcagctgcagcagagcggacccggactggtgagacccagccagaccctgagcgtgacctgcgccatcagcggcgacagcgtgagcagcaacagcgccagctggaactggatcaggcagagccccagcagaggcctggagtggctgggaaggacatactacaggagcgagtggttcaacgactacgccgtgagcgtgaagagcagggtgaccatcaaccccgacaccagcaagaaccagctgagcctgcagctgaacagcgtgatccccgaggacaccgccgtgtactactgcgccagagaggccagaatcggcgtggccggcaaaggcttcgactactggggccagggcaccctggtgacagtgtccagc

SEQ ID NO: 629 - DNA, 762 bp, synthetic construct
  misc_feature 1..762: note = Description of Artificial Sequence: Synthetic polynucleotide
  source 1..762: mol_type = other DNA
caggtgcagctgcagcagagcggacctggcctggtgaagcccagccagaccctgagcctgacatgcgccatcagcggcgacagcgtgagcagcaatagggccgcctggaactggatcaggcagacccctagcaggggcctggaatggctgggcaggacatactacaggagcgagtggtacaacgactacgccgtgtccgtgaagagcaggatcaccatcaaccccgacaccagcaagaaccagttcagcctgcagctgaacagcgtgacccccgaggacaccgccgtgtactactgcgccagagtgagagccgccgtgcctttcgactactggggccagggcaccctggtgacagtgagcagcggcggatctgagggaaagtccagcggctccggcagcgaaagcaagtccaccggcggaagcgacatcgtgatgacccagagccccgatagcctggctgtgagcctgggcgagagggccaccatcaactgcaagagcagccagagcgtgctgttttccagcaacaacaagaactacctggcctggtaccagcagaaacccggccagccccccaacctgctgatctactgggccagcaccagagaaagcggcgtgcccgacaggtttagcggcagcgtgagcggcaccgacttcaccctgaccatcagcagcctgcaggccgaggacgtggccatctactactgccagcagtaccacagcaccccctggacattcggccagggcaccaaggtggagatcaag

SEQ ID NO: 630 - DNA, 762 bp, synthetic construct
  misc_feature 1..762: note = Description of Artificial Sequence: Synthetic polynucleotide
  source 1..762: mol_type = other DNA
gacatcgtgatgacccagagccccgatagcctggctgtgagcctgggcgagagggccaccatcaactgcaagagcagccagagcgtgctgttttccagcaacaacaagaactacctggcctggtaccagcagaaacccggccagccccccaacctgctgatctactgggccagcaccagagaaagcggcgtgcccgacaggtttagcggcagcgtgagcggcaccgacttcaccctgaccatcagcagcctgcaggccgaggacgtggccatctactactgccagcagtaccacagcaccccctggacattcggccagggcaccaaggtggagatcaagggcggatctgagggaaagtccagcggctccggcagcgaaagcaagtccaccggcggaagccaggtgcagctgcagcagagcggacctggcctggtgaagcccagccagaccctgagcctgacatgcgccatcagcggcgacagcgtgagcagcaatagggccgcctggaactggatcaggcagacccctagcaggggcctggaatggctgggcaggacatactacaggagcgagtggtacaacgactacgccgtgtccgtgaagagcaggatcaccatcaaccccgacaccagcaagaaccagttcagcctgcagctgaacagcgtgacccccgaggacaccgccgtgtactactgcgccagagtgagagccgccgtgcctttcgactactggggccagggcaccctggtgacagtgagcagc

SEQ ID NO: 631 - DNA, 756 bp, synthetic construct
  misc_feature 1..756: note = Description of Artificial Sequence: Synthetic polynucleotide
  source 1..756: mol_type = other DNA
cagctgcagctgcaggagagcggccctggactggtgaagcccagcgagaccctgagcctgatgtgcaccgtgagcggcggcagcatcaccagcagcagctactactggggatggatcagacagccccctggcaagggcctggagtggatcggcaacatctactacagcggcaccacctactacaaccccagcctgaagagcagggtgaccatcagcgtggacaccagcaagaaccagttcagcctgaagctgagcagcgtgacagctgccgacaccgccgtgtactactgtgccgccggagccagagacttcgacagctggggacagggcagcctggtgaccgtgtccagcggcggatctgagggaaagtccagcggctccggcagcgaaagcaagtccaccggcggaagcgacatcgtgatgacccagagccctgatagcctggccgtgagcctgggagagagagccaccatcaactgcaagtcctcccagagcgtgctgtacagctccagcaacaagagctacctggcctggtaccagcagaggcccggacagcctcccaagctgctgatctactgggccagcaccagagagagcggcgtgcctgacaggtttagcggctccggctccggcaccgactttaccctgaccatcagcagcctgcaggccgaggatgtggccgtgtactactgccagcagtactacagcacccccaggatgtacaccttcggccagggcaccaagctggagatcaag

SEQ ID NO: 632 - DNA, 756 bp, synthetic construct
  misc_feature 1..756: note = Description of Artificial Sequence: Synthetic polynucleotide
  source 1..756: mol_type = other DNA
gacatcgtgatgacccagagccctgatagcctggccgtgagcctgggagagagagccaccatcaactgcaagtcctcccagagcgtgctgtacagctccagcaacaagagctacctggcctggtaccagcagaggcccggacagcctcccaagctgctgatctactgggccagcaccagagagagcggcgtgcctgacaggtttagcggctccggctccggcaccgactttaccctgaccatcagcagcctgcaggccgaggatgtggccgtgtactactgccagcagtactacagcacccccaggatgtacaccttcggccagggcaccaagctggagatcaagggcggatctgagggaaagtccagcggctccggcagcgaaagcaagtccaccggcggaagccagctgcagctgcaggagagcggccctggactggtgaagcccagcgagaccctgagcctgatgtgcaccgtgagcggcggcagcatcaccagcagcagctactactggggatggatcagacagccccctggcaagggcctggagtggatcggcaacatctactacagcggcaccacctactacaaccccagcctgaagagcagggtgaccatcagcgtggacaccagcaagaaccagttcagcctgaagctgagcagcgtgacagctgccgacaccgccgtgtactactgtgccgccggagccagagacttcgacagctggggacagggcagcctggtgaccgtgtccagc

SEQ ID NO: 633 - DNA, 762 bp, synthetic construct
  misc_feature 1..762: note = Description of Artificial Sequence: Synthetic polynucleotide
  source 1..762: mol_type = other DNA
gaggtgcagctgttggagtcaggtccaggactggtgaagccctcgcagaccctctcactcacctgtgtcatctccggggacagtgtctctagcaacagagctgcttggaactggatcaggcagtccccatcgagaggccttgagtggctgggaaggacatactacaggtccaagtggtataatgattatgcagtatctgtgaaaagtcgaataaccatcaattcagacacatccaagaaccagatctccctgcagttgaactctgtgactcccgaggacacggctgtgtattactgtgcaagagtgagaccggggatcccatttgactactggggccagggaaccccggtcaccgtctcctcaggcggatctgagggaaagtccagcggctccggcagcgaaagcaagtccaccggcggaagcgacatcgtgatgacccagtctccagactccctggctgtgtctctgggcgagagggccaccatcaactgcaagtccagccagagtgttttattcagctccaacaaaaagaactacttagcttggtaccagcagaaaccaggacagccccctaagctgctcatttactgggcatctacccgggaatccggggtccctgaccgattcagtggcagcgggtctgggacagatttcactctcaccatcagcagcctgcaggctgaagatgtggcagtttattactgtcagcaatataatagtactccgtggacgttcggccaagggaccaaggtggagatcaaa

SEQ ID NO: 634 - DNA, 762 bp, synthetic construct
  misc_feature 1..762: note = Description of Artificial Sequence: Synthetic polynucleotide
  source 1..762: mol_type = other DNA
gacatcgtgatgacccagtctccagactccctggctgtgtctctgggcgagagggccaccatcaactgcaagtccagccagagtgttttattcagctccaacaaaaagaactacttagcttggtaccagcagaaaccaggacagccccctaagctgctcatttactgggcatctacccgggaatccggggtccctgaccgattcagtggcagcgggtctgggacagatttcactctcaccatcagcagcctgcaggctgaagatgtggcagtttattactgtcagcaatataatagtactccgtggacgttcggccaagggaccaaggtggagatcaaaggcggatctgagggaaagtccagcggctccggcagcgaaagcaagtccaccggcggaagcgaggtgcagctgttggagtcaggtccaggactggtgaagccctcgcagaccctctcactcacctgtgtcatctccggggacagtgtctctagcaacagagctgcttggaactggatcaggcagtccccatcgagaggccttgagtggctgggaaggacatactacaggtccaagtggtataatgattatgcagtatctgtgaaaagtcgaataaccatcaattcagacacatccaagaaccagatctccctgcagttgaactctgtgactcccgaggacacggctgtgtattactgtgcaagagtgagaccggggatcccatttgactactggggccagggaaccccggtcaccgtctcctca

SEQ ID NO: 635 - DNA, 762 bp, synthetic construct
  misc_feature 1..762: note = Description of Artificial Sequence: Synthetic polynucleotide
  source 1..762: mol_type = other DNA
caggtacagctgcagcagtcaggtccaggactggtgaagccctcgcagaccctctcactcacctgtgtcatctccggggacagtgtctctagcaacagagctgcctggaactggatcaggcagtccccatcgagaggccttgagtggctgggaaggacatactacaggtccaagtggtataatgattatgcagtttctgtgaaaagtcgaataaccatcaattcagacacatccaagaaccagatctccctgcagttgaactctgtgactcccgaggacacggctgtgtattactgtgcaagagtgagaccggggatcccttttgactactggggccagggaaccacggtcaccgtctcctcaggcggatctgagggaaagtccagcggctccggcagcgaaagcaagtccaccggcggaagcgacatccagatgacccagtctccagactccctggctgtgtctctgggcgagagggccaccatcaactgcgagtccagccagagtgttttattcagctccaacaaaaagaactacttagcttggtaccagcagaaaccaggacagccccctaagctgctcatttactgggcatctacccgggaatccggggtccctgaccgattcagtggcagcgggtctgggacagatttcactctcaccatcaaccgcctgcaggctgaagatgtggcagtttattactgtcagcaatataatagtactccgtggacgttcggccaagggaccaaggtggagatcaaa

SEQ ID NO: 636 - DNA, 762 bp, synthetic construct
  misc_feature 1..762: note = Description of Artificial Sequence: Synthetic polynucleotide
  source 1..762: mol_type = other DNA
gacatccagatgacccagtctccagactccctggctgtgtctctgggcgagagggccaccatcaactgcgagtccagccagagtgttttattcagctccaacaaaaagaactacttagcttggtaccagcagaaaccaggacagccccctaagctgctcatttactgggcatctacccgggaatccggggtccctgaccgattcagtggcagcgggtctgggacagatttcactctcaccatcaaccgcctgcaggctgaagatgtggcagtttattactgtcagcaatataatagtactccgtggacgttcggccaagggaccaaggtggagatcaaaggcggatctgagggaaagtccagcggctccggcagcgaaagcaagtccaccggcggaagccaggtacagctgcagcagtcaggtccaggactggtgaagccctcgcagaccctctcactcacctgtgtcatctccggggacagtgtctctagcaacagagctgcctggaactggatcaggcagtccccatcgagaggccttgagtggctgggaaggacatactacaggtccaagtggtataatgattatgcagtttctgtgaaaagtcgaataaccatcaattcagacacatccaagaaccagatctccctgcagttgaactctgtgactcccgaggacacggctgtgtattactgtgcaagagtgagaccggggatcccttttgactactggggccagggaaccacggtcaccgtctcctca

SEQ ID NO: 637 - DNA, 741 bp, synthetic construct
  misc_feature 1..741: note = Description of Artificial Sequence: Synthetic polynucleotide
  source 1..741: mol_type = other DNA
gaggtgcagctgttggagtctgggggaggcttggtacagcctggggggtccctgagactctcctgtgcagcctctggattcacctttagcagctatgccatgcactgggtccgccaggccccagggaaggggctggactgggtctcaggtattagtggtagtggctttagcacatactatgtagactccgtgaagggccggttcaccatctccagagacaattccaagcacacgctgtatctgcaaatgaacagcctgagagccgaggacacggccgtatattactgtgcgaaagataatttagtggctggtaccgtctttgactactggggccagggaaccctggtcaccgtctcctcaggcggatctgagggaaagtccagcggctccggcagcgaaagcaagtccaccggcggaagcgacatccagatgacccagtctccttccaccctgtctgcatctgtaggagacagagtcaccatcacttgccgggccagtcagagtattagtagctggttggcctggtatcagcagaaaccagggaaagcccctaagctcctgatctataaggcgtctagtttagaaagtggggtcccatcaaggttcagcggcagtggatctgggacagaattcactctcaccatcagcagcctgcagcctgatgattttgcaacttattactgccaacagtataatagttattcgctcactttcggcggagggaccaaggtggatatcaaa

SEQ ID NO: 638 - DNA, 741 bp, synthetic construct
  misc_feature 1..741: note = Description of Artificial Sequence: Synthetic polynucleotide
  source 1..741: mol_type = other DNA
gacatccagatgacccagtctccttccaccctgtctgcatctgtaggagacagagtcaccatcacttgccgggccagtcagagtattagtagctggttggcctggtatcagcagaaaccagggaaagcccctaagctcctgatctataaggcgtctagtttagaaagtggggtcccatcaaggttcagcggcagtggatctgggacagaattcactctcaccatcagcagcctgcagcctgatgattttgcaacttattactgccaacagtataatagttattcgctcactttcggcggagggaccaaggtggatatcaaaggcggatctgagggaaagtccagcggctccggcagcgaaagcaagtccaccggcggaagcgaggtgcagctgttggagtctgggggaggcttggtacagcctggggggtccctgagactctcctgtgcagcctctggattcacctttagcagctatgccatgcactgggtccgccaggccccagggaaggggctggactgggtctcaggtattagtggtagtggctttagcacatactatgtagactccgtgaagggccggttcaccatctccagagacaattccaagcacacgctgtatctgcaaatgaacagcctgagagccgaggacacggccgtatattactgtgcgaaagataatttagtggctggtaccgtctttgactactggggccagggaaccctggtcaccgtctcctca

SEQ ID NO: 639 - DNA, 774 bp, synthetic construct
  misc_feature 1..774: note = Description of Artificial Sequence: Synthetic polynucleotide
  source 1..774: mol_type = other DNA
caagtacaactgcaacaaagtggtcctgggctcgtgaagccttcccagactctcagcctcacatgcgctataagtggggattctgtttcctcaaattcagcagcctggaattggatacgacagtctccatcccgtggccttgagtggcttggtagaacttattaccgatccaagtggtacaatgattacgccgtttcagtgaagtcccgcattactattaatcccgacacatctaagaatcaaatttcattgcaactgaatagcgtaacacccgaagatacagcagtttattattgtgcaggtgatcgacgctacggcatagtgggacttcctttcgcctattggggccaagggacactggtcactgtgtcatccggcggatctgagggaaagtccagcggctccggcagcgaaagcaagtccaccggcggaagcgacatcgtaatgacacagtcaccagattcattggcagttagtctgggtgaaagggcaacaatcaactgcaagtcttctcagagtgtactgcatagttctaacaataagaactaccttacctggtttcaacagaaaccaggtcagccccccaagttgctgatttactgggcaagcacccgcgaatccggcgttcccgatcgattttcaggttccgggagtgggaccgactttaccttgaccatctcttccttgcaggccgaagatgtagccgtctattactgccatcagtattactctactccccccacattcggtcaaggtacaaaagttgagataaaa

SEQ ID NO: 640 - DNA, 774 bp, synthetic construct
  misc_feature 1..774: note = Description of Artificial Sequence: Synthetic polynucleotide
  source 1..774: mol_type = other DNA
gacatcgtaatgacacagtcaccagattcattggcagttagtctgggtgaaagggcaacaatcaactgcaagtcttctcagagtgtactgcatagttctaacaataagaactaccttacctggtttcaacagaaaccaggtcagccccccaagttgctgatttactgggcaagcacccgcgaatccggcgttcccgatcgattttcaggttccgggagtgggaccgactttaccttgaccatctcttccttgcaggccgaagatgtagccgtctattactgccatcagtattactctactccccccacattcggtcaaggtacaaaagttgagataaaaggcggatctgagggaaagtccagcggctccggcagcgaaagcaagtccaccggcggaagccaagtacaactgcaacaaagtggtcctgggctcgtgaagccttcccagactctcagcctcacatgcgctataagtggggattctgtttcctcaaattcagcagcctggaattggatacgacagtctccatcccgtggccttgagtggcttggtagaacttattaccgatccaagtggtacaatgattacgccgtttcagtgaagtcccgcattactattaatcccgacacatctaagaatcaaatttcattgcaactgaatagcgtaacacccgaagatacagcagtttattattgtgcaggtgatcgacgctacggcatagtgggacttcctttcgcctattggggccaagggacactggtcactgtgtcatcc

SEQ ID NO: 641 - DNA, 741 bp, synthetic construct
  misc_feature 1..741: note = Description of Artificial Sequence: Synthetic polynucleotide
  source 1..741: mol_type = other DNA
gaggtgcaactccttgaatcaggcggaggactcgtccaacctggagggagtcttaggcttagctgtgcagccagtggctttacttttagcagctatgcaatgcactgggtcaggcaggctcctggtaaggggctcgaatgggtcagcggcatatccgggtcaggtttctctacatattatgtcgattctgtaaaaggacgattcaccatatccagagacaattctaaaaataccttgtatctccagatgaacagcctgagagcagaagataccgcagtttattactgtgcaaaggataatctggttgccgggacagtttttgattattgggggcaaggcaccctcgtcacagtatccagtggcggatctgagggaaagtccagcggctccggcagcgaaagcaagtccaccggcggaagcgatattcagatgactcaatcaccttcaacccttagcgcctccgttggagatcgcgttaccattacctgccgagcctcccaaagtatcagctcatggttggcatggtatcaacagaagcctggaaaggcacccaaacttctgatttacaaagccagctccttggagtcaggagtcccaagccggttcagcggatctgggtcagggacagaatttaccctgaccatatcttcccttcagcccgacgacttcgccacttactattgtcagcaatacaactcctattccctgactttcggcggtggcacaaaggttgacatcaag

SEQ ID NO: 642 - DNA, 741 bp, synthetic construct
  misc_feature 1..741: note = Description of Artificial Sequence: Synthetic polynucleotide
  source 1..741: mol_type = other DNA
gatattcagatgactcaatcaccttcaacccttagcgcctccgttggagatcgcgttaccattacctgccgagcctcccaaagtatcagctcatggttggcatggtatcaacagaagcctggaaaggcacccaaacttctgatttacaaagccagctccttggagtcaggagtcccaagccggttcagcggatctgggtcagggacagaatttaccctgaccatatcttcccttcagcccgacgacttcgccacttactattgtcagcaatacaactcctattccctgactttcggcggtggcacaaaggttgacatcaagggcggatctgagggaaagtccagcggctccggcagcgaaagcaagtccaccggcggaagcgaggtgcaactccttgaatcaggcggaggactcgtccaacctggagggagtcttaggcttagctgtgcagccagtggctttacttttagcagctatgcaatgcactgggtcaggcaggctcctggtaaggggctcgaatgggtcagcggcatatccgggtcaggtttctctacatattatgtcgattctgtaaaaggacgattcaccatatccagagacaattctaaaaataccttgtatctccagatgaacagcctgagagcagaagataccgcagtttattactgtgcaaaggataatctggttgccgggacagtttttgattattgggggcaaggcaccctcgtcacagtatccagt

SEQ ID NO: 643 - DNA, 762 bp, synthetic construct
  misc_feature 1..762: note = Description of Artificial Sequence: Synthetic polynucleotide
  source 1..762: mol_type = other DNA
caggtgcagcttcaacagagcggacctggtctggttaagccttcccaaaccctgagcctgacttgtgctatttccggggatagtgttagctccaatagggcagcatggaactggatcagacagtccccaagccgtggacttgagtggcttggacgtacttattacaggagtaaatggtacaatgattatgccgtttctgtgaagagccgtattactataaacccagatacttctaaaaatcaaatttcccttcagctcaactcagttacaccagaggatactgcagtctattattgcgcaagagttcgacctggcattcccttcgattattgggggcaggggacacccgttactgtgtcctcaggcggatctgagggaaagtccagcggctccggcagcgaaagcaagtccaccggcggaagcgatattgttatgacacagtccccagattcattggcagtaagcctcggtgaacgggctactattaactgtaagtcttcccagagtgtattgttctcttcaaataacaaaaactacctggcatggtatcagcaaaagcctggtcaaccccctaaacttctcatatactgggcatccactcgggagagcggtgtgccagaccgtttctcagggagtgtgtcaggtacagattttacactcacaatttccagcctccaagccgaagacgttgcagtatattattgccaacaatatcactctacaccttggacatttggtcaaggtactaaagtcgaaatcaaa

SEQ ID NO: 644 - DNA, 762 bp, synthetic construct
  misc_feature 1..762: note = Description of Artificial Sequence: Synthetic polynucleotide
  source 1..762: mol_type = other DNA
gatattgttatgacacagtccccagattcattggcagtaagcctcggtgaacgggctactattaactgtaagtcttcccagagtgtattgttctcttcaaataacaaaaactacctggcatggtatcagcaaaagcctggtcaaccccctaaacttctcatatactgggcatccactcgggagagcggtgtgccagaccgtttctcagggagtgtgtcaggtacagattttacactcacaatttccagcctccaagccgaagacgttgcagtatattattgccaacaatatcactctacaccttggacatttggtcaaggtactaaagtcgaaatcaaaggcggatctgagggaaagtccagcggctccggcagcgaaagcaagtccaccggcggaagccaggtgcagcttcaacagagcggacctggtctggttaagccttcccaaaccctgagcctgacttgtgctatttccggggatagtgttagctccaatagggcagcatggaactggatcagacagtccccaagccgtggacttgagtggcttggacgtacttattacaggagtaaatggtacaatgattatgccgtttctgtgaagagccgtattactataaacccagatacttctaaaaatcaaatttcccttcagctcaactcagttacaccagaggatactgcagtctattattgcgcaagagttcgacctggcattcccttcgattattgggggcaggggacacccgttactgtgtcctca

SEQ ID NO: 645 - DNA, 1470 bp, synthetic construct
  misc_feature 1..1470: note = Description of Artificial Sequence: Synthetic polynucleotide
  source 1..1470: mol_type = other DNA
caggtgcagctgcagcagagcggccctggactggtgaagcccagccagaccctgagcctgacctgcgctatcagcggcgatagcgtgagctccaacagcgccgcctggaactggatcaggcagagccctagcaggggcctggaatggctgggcaggacctactacaggagcaagtggtacaacgactacgccgtgtccgtgaagagcaggatcaccatcaaccccgacaccagcaagaaccagatcagcctgcagctgaacagcgtgacccccgaggacaccgccgtgtactactgcgccggcgacagaaggtacggcatcgtgggcctgcctttcgcctactggggccagggaaccctggtgaccgtgagcagcggcggatctgagggaaagtccagcggctccggcagcgaaagcaagtccaccggcggaagcgacatcgtgatgacccagagccccgatagcctggctgtgagcctgggcgagagagccaccatcaactgcaagagcagccagagcgtgctgcacagcagcaacaacaagaactacctgacctggttccagcagaagcccggccagcctcccaagctgctgatctactgggctagcaccagagagtccggcgtgcctgacaggttcagcggaagcggcagcggcaccgacttcaccctgaccatcagcagcctgcaggccgaggacgtggccgtgtactactgccaccagtactacagcaccccccctacctttggccagggcaccaaggtggagatcaaggagcccaaatctagcgacaaaactcacacttgtccaccgtgcccagcacctgaagcagcagggggaccgtcagtcttcctcttccccccaaaacccaaggacaccctcatgatctcccggacccctgaggtcacatgcgtggtggtgagcgtgagccacgaagaccctgaggtcaagttcaactggtacgtggacggcgtggaggtgcataatgccaagacaaagccgcgggaggagcagtacaacagcacgtaccgtgtggtcagcgtcctcaccgtcctgcaccaggactggctgaatggcaaggagtacaagtgcaaggtgtccaacaaagccctcccagcccccatcgagaaaaccatctccaaagccaaagggcagccccgagaaccacaggtgtacgtgctgcccccatcccgggaggagatgaccaagaaccaggtcagcctgctgtgcctggtcaaaggcttctatcccagcgacatcgccgtggagtgggagagcaatgggcagccggagaacaactacctcacctggcctcccgtgctggactccgacggctccttcttcctctacagcaagctcaccgtggacaagtccagatggcagcaggggaacgtcttctcatgctccgtgatgcatgaggctctgcacaaccactacacgcagaagtctctctccctgtctccgggaaaa

SEQ ID NO: 646 - DNA, 1470 bp, synthetic construct
  misc_feature 1..1470: note = Description of Artificial Sequence: Synthetic polynucleotide
  source 1..1470: mol_type = other DNA
gacatcgtgatgacccagagccccgatagcctggctgtgagcctgggcgagagagccaccatcaactgcaagagcagccagagcgtgctgcacagcagcaacaacaagaactacctgacctggttccagcagaagcccggccagcctcccaagctgctgatctactgggctagcaccagagagtccggcgtgcctgacaggttcagcggaagcggcagcggcaccgacttcaccctgaccatcagcagcctgcaggccgaggacgtggccgtgtactactgccaccagtactacagcaccccccctacctttggccagggcaccaaggtggagatcaagggcggatctgagggaaagtccagcggctccggcagcgaaagcaagtccaccggcggaagccaggtgcagctgcagcagagcggccctggactggtgaagcccagccagaccctgagcctgacctgcgctatcagcggcgatagcgtgagctccaacagcgccgcctggaactggatcaggcagagccctagcaggggcctggaatggctgggcaggacctactacaggagcaagtggtacaacgactacgccgtgtccgtgaagagcaggatcaccatcaaccccgacaccagcaagaaccagatcagcctgcagctgaacagcgtgacccccgaggacaccgccgtgtactactgcgccggcgacagaaggtacggcatcgtgggcctgcctttcgcctactggggccagggaaccctggtgaccgtgagcagcgagcccaaatctagcgacaaaactcacacttgtccaccgtgcccagcacctgaagcagcagggggaccgtcagtcttcctcttccccccaaaacccaaggacaccctcatgatctcccggacccctgaggtcacatgcgtggtggtgagcgtgagccacgaagaccctgaggtcaagttcaactggtacgtggacggcgtggaggtgcataatgccaagacaaagccgcgggaggagcagtacaacagcacgtaccgtgtggtcagcgtcctcaccgtcctgcaccaggactggctgaatggcaaggagtacaagtgcaaggtgtccaacaaagccctcccagcccccatcgagaaaaccatctccaaagccaaagggcagccccgagaaccacaggtgtacgtgctgcccccatcccgggaggagatgaccaagaaccaggtcagcctgctgtgcctggtcaaaggcttctatcccagcgacatcgccgtggagtgggagagcaatgggcagccggagaacaactacctcacctggcctcccgtgctggactccgacggctccttcttcctctacagcaagctcaccgtggacaagtccagatggcagcaggggaacgtcttctcatgctccgtgatgcatgaggctctgcacaaccactacacgcagaagtctctctccctgtctccgggaaaa

SEQ ID NO: 647 - DNA, 1464 bp, synthetic construct
  misc_feature 1..1464: note = Description of Artificial Sequence: Synthetic polynucleotide
  source 1..1464: mol_type = other DNA
caggtgcagctgcagcagagcggacccggcctggtgaaacccagccagaccctgagcctgacctgcgccatcagcggcgacagcgtgagcaacaacagcgccgcctggaactggatcaggcagagccccagcagaggcctggaatggctgggcaggacctactacaggagcaagtggtacaacgactacgccgtgagcgtgaagagcaggatcaccatcaaccccgacacctccaagaaccagttcagcctgcagctgaacagcgtgacccccgaggacaccgccgtgtactactgcgccaggtatggcagcggcaccctgctgttcgactactggggccagggcaccctggtgacagtgagcagcggcggatctgagggaaagtccagcggctccggcagcgaaagcaagtccaccggcggaagcgacatcgtgatgacccagagccccgatagcctggctgtgagcctgggagagagggccaccatcaactgcaagagcagccagagcgtgctgtacagcagcaagaacaagaactacctggcctggtaccagcagaaacccggccagccccccaagctgctgatctactgggccagcacaagggaaagcggcgtgcccgacagattcagcggaagcggcagcggcaccgacttcaccctgaccatcagcagcctgcaggccgaggatgtggccgtgtactactgccagcagtactacagcaccttcccctacaccttcggccagggcaccaagctggagatcaaggagcccaaatctagcgacaaaactcacacttgtccaccgtgcccagcacctgaagcagcagggggaccgtcagtcttcctcttccccccaaaacccaaggacaccctcatgatctcccggacccctgaggtcacatgcgtggtggtgagcgtgagccacgaagaccctgaggtcaagttcaactggtacgtggacggcgtggaggtgcataatgccaagacaaagccgcgggaggagcagtacaacagcacgtaccgtgtggtcagcgtcctcaccgtcctgcaccaggactggctgaatggcaaggagtacaagtgcaaggtgtccaacaaagccctcccagcccccatcgagaaaaccatctccaaagccaaagggcagccccgagaaccacaggtgtacgtgctgcccccatcccgggaggagatgaccaagaaccaggtcagcctgctgtgcctggtcaaaggcttctatcccagcgacatcgccgtggagtgggagagcaatgggcagccggagaacaactacctcacctggcctcccgtgctggactccgacggctccttcttcctctacagcaagctcaccgtggacaagtccagatggcagcaggggaacgtcttctcatgctccgtgatgcatgaggctctgcacaaccactacacgcagaagtctctctccctgtctccgggaaaa

SEQ ID NO: 648 - DNA, 1464 bp, synthetic construct
  misc_feature 1..1464: note = Description of Artificial Sequence: Synthetic polynucleotide
  source 1..1464: mol_type = other DNA
gacatcgtgatgacccagagccccgatagcctggctgtgagcctgggagagagggccaccatcaactgcaagagcagccagagcgtgctgtacagcagcaagaacaagaactacctggcctggtaccagcagaaacccggccagccccccaagctgctgatctactgggccagcacaagggaaagcggcgtgcccgacagattcagcggaagcggcagcggcaccgacttcaccctgaccatcagcagcctgcaggccgaggatgtggccgtgtactactgccagcagtactacagcaccttcccctacaccttcggccagggcaccaagctggagatcaagggcggatctgagggaaagtccagcggctccggcagcgaaagcaagtccaccggcggaagccaggtgcagctgcagcagagcggacccggcctggtgaaacccagccagaccctgagcctgacctgcgccatcagcggcgacagcgtgagcaacaacagcgccgcctggaactggatcaggcagagccccagcagaggcctggaatggctgggcaggacctactacaggagcaagtggtacaacgactacgccgtgagcgtgaagagcaggatcaccatcaaccccgacacctccaagaaccagttcagcctgcagctgaacagcgtgacccccgaggacaccgccgtgtactactgcgccaggtatggcagcggcaccctgctgttcgactactggggccagggcaccctggtgacagtgagcagcgagcccaaatctagcgacaaaactcacacttgtccaccgtgcccagcacctgaagcagcagggggaccgtcagtcttcctcttccccccaaaacccaaggacaccctcatgatctcccggacccctgaggtcacatgcgtggtggtgagcgtgagccacgaagaccctgaggtcaagttcaactggtacgtggacggcgtggaggtgcataatgccaagacaaagccgcgggaggagcagtacaacagcacgtaccgtgtggtcagcgtcctcaccgtcctgcaccaggactggctgaatggcaaggagtacaagtgcaaggtgtccaacaaagccctcccagcccccatcgagaaaaccatctccaaagccaaagggcagccccgagaaccacaggtgtacgtgctgcccccatcccgggaggagatgaccaagaaccaggtcagcctgctgtgcctggtcaaaggcttctatcccagcgacatcgccgtggagtgggagagcaatgggcagccggagaacaactacctcacctggcctcccgtgctggactccgacggctccttcttcctctacagcaagctcaccgtggacaagtccagatggcagcaggggaacgtcttctcatgctccgtgatgcatgaggctctgcacaaccactacacgcagaagtctctctccctgtctccgggaaaa

SEQ ID NO: 649 - DNA, 1470 bp, synthetic construct
  misc_feature 1..1470: note = Description of Artificial Sequence: Synthetic polynucleotide
  source 1..1470: mol_type = other DNA
caggtgcagctgcagcagagcggacccggactggtgagacccagccagaccctgagcgtgacctgcgccatcagcggcgacagcgtgagcagcaacagcgccagctggaactggatcaggcagagccccagcagaggcctggagtggctgggaaggacatactacaggagcgagtggttcaacgactacgccgtgagcgtgaagagcagggtgaccatcaaccccgacaccagcaagaaccagctgagcctgcagctgaacagcgtgatccccgaggacaccgccgtgtactactgcgccagagaggccagaatcggcgtggccggcaaaggcttcgactactggggccagggcaccctggtgacagtgtccagcggcggatctgagggaaagtccagcggctccggcagcgaaagcaagtccaccggcggaagcgacatcgtgatgacccagagccctgactccctggctgtgagcctgggcgagagagccaccatcaactgcaagagcagccagagcgtgctgttcaggagcaacaacaagaactacctggcctggttccagcagaagcccggccagcctcccaagctgctgatctactgggccagcaccagagagagcggcgtgcccgatagatttagcggcagcggcagcggcaccgactttaccctgaccatcagctccctgcaggccgaggatgtggccgtgtactactgccagcagtactacagcacccccagaaccttcggccagggcaccaaggtggagatcaaggagcccaaatctagcgacaaaactcacacttgtccaccgtgcccagcacctgaagcagcagggggaccgtcagtcttcctcttccccccaaaacccaaggacaccctcatgatctcccggacccctgaggtcacatgcgtggtggtgagcgtgagccacgaagaccctgaggtcaagttcaactggtacgtggacggcgtggaggtgcataatgccaagacaaagccgcgggaggagcagtacaacagcacgtaccgtgtggtcagcgtcctcaccgtcctgcaccaggactggctgaatggcaaggagtacaagtgcaaggtgtccaacaaagccctcccagcccccatcgagaaaaccatctccaaagccaaagggcagccccgagaaccacaggtgtacgtgctgcccccatcccgggaggagatgaccaagaaccaggtcagcctgctgtgcctggtcaaaggcttctatcccagcgacatcgccgtggagtgggagagcaatgggcagccggagaacaactacctcacctggcctcccgtgctggactccgacggctccttcttcctctacagcaagctcaccgtggacaagtccagatggcagcaggggaacgtcttctcatgctccgtgatgcatgaggctctgcacaaccactacacgcagaagtctctctccctgtctccgggaaaa

SEQ ID NO: 650 - DNA, 1470 bp, synthetic construct
  misc_feature 1..1470: note = Description of Artificial Sequence: Synthetic polynucleotide
  source 1..1470: mol_type = other DNA
gacatcgtgatgacccagagccctgactccctggctgtgagcctgggcgagagagccaccatcaactgcaagagcagccagagcgtgctgttcaggagcaacaacaagaactacctggcctggttccagcagaagcccggccagcctcccaagctgctgatctactgggccagcaccagagagagcggcgtgcccgatagatttagcggcagcggcagcggcaccgactttaccctgaccatcagctccctgcaggccgaggatgtggccgtgtactactgccagcagtactacagcacccccagaaccttcggccagggcaccaaggtggagatcaagggcggatctgagggaaagtccagcggctccggcagcgaaagcaagtccaccggcggaagccaggtgcagctgcagcagagcggacccggactggtgagacccagccagaccctgagcgtgacctgcgccatcagcggcgacagcgtgagcagcaacagcgccagctggaactggatcaggcagagccccagcagaggcctggagtggctgggaaggacatactacaggagcgagtggttcaacgactacgccgtgagcgtgaagagcagggtgaccatcaaccccgacaccagcaagaaccagctgagcctgcagctgaacagcgtgatccccgaggacaccgccgtgtactactgcgccagagaggccagaatcggcgtggccggcaaaggcttcgactactggggccagggcaccctggtgacagtgtccagcgagcccaaatctagcgacaaaactcacacttgtccaccgtgcccagcacctgaagcagcagggggaccgtcagtcttcctcttccccccaaaacccaaggacaccctcatgatctcccggacccctgaggtcacatgcgtggtggtgagcgtgagccacgaagaccctgaggtcaagttcaactggtacgtggacggcgtggaggtgcataatgccaagacaaagccgcgggaggagcagtacaacagcacgtaccgtgtggtcagcgtcctcaccgtcctgcaccaggactggctgaatggcaaggagtacaagtgcaaggtgtccaacaaagccctcccagcccccatcgagaaaaccatctccaaagccaaagggcagccccgagaaccacaggtgtacgtgctgcccccatcccgggaggagatgaccaagaaccaggtcagcctgctgtgcctggtcaaaggcttctatcccagcgacatcgccgtggagtgggagagcaatgggcagccggagaacaactacctcacctggcctcccgtgctggactccgacggctccttcttcctctacagcaagctcaccgtggacaagtccagatggcagcaggggaacgtcttctcatgctccgtgatgcatgaggctctgcacaaccactacacgcagaagtctctctccctgtctccgggaaaa

SEQ ID NO: 651 - DNA, 1458 bp, synthetic construct
  misc_feature 1..1458: note = Description of Artificial Sequence: Synthetic polynucleotide
  source 1..1458: mol_type = other DNA
caggtgcagctgcagcagagcggacctggcctggtgaagcccagccagaccctgagcctgacatgcgccatcagcggcgacagcgtgagcagcaatagggccgcctggaactggatcaggcagacccctagcaggggcctggaatggctgggcaggacatactacaggagcgagtggtacaacgactacgccgtgtccgtgaagagcaggatcaccatcaaccccgacaccagcaagaaccagttcagcctgcagctgaacagcgtgacccccgaggacaccgccgtgtactactgcgccagagtgagagccgccgtgcctttcgactactggggccagggcaccctggtgacagtgagcagcggcggatctgagggaaagtccagcggctccggcagcgaaagcaagtccaccggcggaagcgacatcgtgatgacccagagccccgatagcctggctgtgagcctgggcgagagggccaccatcaactgcaagagcagccagagcgtgctgttttccagcaacaacaagaactacctggcctggtaccagcagaaacccggccagccccccaacctgctgatctactgggccagcaccagagaaagcggcgtgcccgacaggtttagcggcagcgtgagcggcaccgacttcaccctgaccatcagcagcctgcaggccgaggacgtggccatctactactgccagcagtaccacagcaccccctggacattcggccagggcaccaaggtggagatcaaggagcccaaatctagcgacaaaactcacacttgtccaccgtgcccagcacctgaagcagcagggggaccgtcagtcttcctcttccccccaaaacccaaggacaccctcatgatctcccggacccctgaggtcacatgcgtggtggtgagcgtgagccacgaagaccctgaggtcaagttcaactggtacgtggacggcgtggaggtgcataatgccaagacaaagccgcgggaggagcagtacaacagcacgtaccgtgtggtcagcgtcctcaccgtcctgcaccaggactggctgaatggcaaggagtacaagtgcaaggtgtccaacaaagccctcccagcccccatcgagaaaaccatctccaaagccaaagggcagccccgagaaccacaggtgtacgtgctgcccccatcccgggaggagatgaccaagaaccaggtcagcctgctgtgcctggtcaaaggcttctatcccagcgacatcgccgtggagtgggagagcaatgggcagccggagaacaactacctcacctggcctcccgtgctggactccgacggctccttcttcctctacagcaagctcaccgtggacaagtccagatggcagcaggggaacgtcttctcatgctccgtgatgcatgaggctctgcacaaccactacacgcagaagtctctctccctgtctccgggaaaa

SEQ ID NO: 652 - DNA, 1458 bp, synthetic construct
  misc_feature 1..1458: note = Description of Artificial Sequence: Synthetic polynucleotide
  source 1..1458: mol_type = other DNA
gacatcgtgatgacccagagccccgatagcctggctgtgagcctgggcgagagggccaccatcaactgcaagagcagccagagcgtgctgttttccagcaacaacaagaactacctggcctggtaccagcagaaacccggccagccccccaacctgctgatctactgggccagcaccagagaaagcggcgtgcccgacaggtttagcggcagcgtgagcggcaccgacttcaccctgaccatcagcagcctgcaggccgaggacgtggccatctactactgccagcagtaccacagcaccccctggacattcggccagggcaccaaggtggagatcaagggcggatctgagggaaagtccagcggctccggcagcgaaagcaagtccaccggcggaagccaggtgcagctgcagcagagcggacctggcctggtgaagcccagccagaccctgagcctgacatgcgccatcagcggcgacagcgtgagcagcaatagggccgcctggaactggatcaggcagacccctagcaggggcctggaatggctgggcaggacatactacaggagcgagtggtacaacgactacgccgtgtccgtgaagagcaggatcaccatcaaccccgacaccagcaagaaccagttcagcctgcagctgaacagcgtgacccccgaggacaccgccgtgtactactgcgccagagtgagagccgccgtgcctttcgactactggggccagggcaccctggtgacagtgagcagcgagcccaaatctagcgacaaaactcacacttgtccaccgtgcccagcacctgaagcagcagggggaccgtcagtcttcctcttccccccaaaacccaaggacaccctcatgatctcccggacccctgaggtcacatgcgtggtggtgagcgtgagccacgaagaccctgaggtcaagttcaactggtacgtggacggcgtggaggtgcataatgccaagacaaagccgcgggaggagcagtacaacagcacgtaccgtgtggtcagcgtcctcaccgtcctgcaccaggactggctgaatggcaaggagtacaagtgcaaggtgtccaacaaagccctcccagcccccatcgagaaaaccatctccaaagccaaagggcagccccgagaaccacaggtgtacgtgctgcccccatcccgggaggagatgaccaagaaccaggtcagcctgctgtgcctggtcaaaggcttctatcccagcgacatcgccgtggagtgggagagcaatgggcagccggagaacaactacctcacctggcctcccgtgctggactccgacggctccttcttcctctacagcaagctcaccgtggacaagtccagatggcagcaggggaacgtcttctcatgctccgtgatgcatgaggctctgcacaaccactacacgcagaagtctctctccctgtctccgggaaaa

SEQ ID NO: 653 - DNA, 1452 bp, synthetic construct
  misc_feature 1..1452: note = Description of Artificial Sequence: Synthetic polynucleotide
  source 1..1452: mol_type = other DNA
cagctgcagctgcaggagagcggccctggactggtgaagcccagcgagaccctgagcctgatgtgcaccgtgagcggcggcagcatcaccagcagcagctactactggggatggatcagacagccccctggcaagggcctggagtggatcggcaacatctactacagcggcaccacctactacaaccccagcctgaagagcagggtgaccatcagcgtggacaccagcaagaaccagttcagcctgaagctgagcagcgtgacagctgccgacaccgccgtgtactactgtgccgccggagccagagacttcgacagctggggacagggcagcctggtgaccgtgtccagcggcggatctgagggaaagtccagcggctccggcagcgaaagcaagtccaccggcggaagcgacatcgtgatgacccagagccctgatagcctggccgtgagcctgggagagagagccaccatcaactgcaagtcctcccagagcgtgctgtacagctccagcaacaagagctacctggcctggtaccagcagaggcccggacagcctcccaagctgctgatctactgggccagcaccagagagagcggcgtgcctgacaggtttagcggctccggctccggcaccgactttaccctgaccatcagcagcctgcaggccgaggatgtggccgtgtactactgccagcagtactacagcacccccaggatgtacaccttcggccagggcaccaagctggagatcaaggagcccaaatctagcgacaaaactcacacttgtccaccgtgcccagcacctgaagcagcagggggaccgtcagtcttcctcttccccccaaaacccaaggacaccctcatgatctcccggacccctgaggtcacatgcgtggtggtgagcgtgagccacgaagaccctgaggtcaagttcaactggtacgtggacggcgtggaggtgcataatgccaagacaaagccgcgggaggagcagtacaacagcacgtaccgtgtggtcagcgtcctcaccgtcctgcaccaggactggctgaatggcaaggagtacaagtgcaaggtgtccaacaaagccctcccagcccccatcgagaaaaccatctccaaagccaaagggcagccccgagaaccacaggtgtacgtgctgcccccatcccgggaggagatgaccaagaaccaggtcagcctgctgtgcctggtcaaaggcttctatcccagcgacatcgccgtggagtgggagagcaatgggcagccggagaacaactacctcacctggcctcccgtgctggactccgacggctccttcttcctctacagcaagctcaccgtggacaagtccagatggcagcaggggaacgtcttctcatgctccgtgatgcatgaggctctgcacaaccactacacgcagaagtctctctccctgtctccgggaaaa

SEQ ID NO: 654 - DNA, 1452 bp, synthetic construct
  misc_feature 1..1452: note = Description of Artificial Sequence: Synthetic polynucleotide
  source 1..1452: mol_type = other DNA
gacatcgtgatgacccagagccctgatagcctggccgtgagcctgggagagagagccaccatcaactgcaagtcctcccagagcgtgctgtacagctccagcaacaagagctacctggcctggtaccagcagaggcccggacagcctcccaagctgctgatctactgggccagcaccagagagagcggcgtgcctgacaggtttagcggctccggctccggcaccgactttaccctgaccatcagcagcctgcaggccgaggatgtggccgtgtactactgccagcagtactacagcacccccaggatgtacaccttcggccagggcaccaagctggagatcaagggcggatctgagggaaagtccagcggctccggcagcgaaagcaagtccaccggcggaagccagctgcagctgcaggagagcggccctggactggtgaagcccagcgagaccctgagcctgatgtgcaccgtgagcggcggcagcatcaccagcagcagctactactggggatggatcagacagccccctggcaagggcctggagtggatcggcaacatctactacagcggcaccacctactacaaccccagcctgaagagcagggtgaccatcagcgtggacaccagcaagaaccagttcagcctgaagctgagcagcgtgacagctgccgacaccgccgtgtactactgtgccgccggagccagagacttcgacagctggggacagggcagcctggtgaccgtgtccagcgagcccaaatctagcgacaaaactcacacttgtccaccgtgcccagcacctgaagcagcagggggaccgtcagtcttcctcttccccccaaaacccaaggacaccctcatgatctcccggacccctgaggtcacatgcgtggtggtgagcgtgagccacgaagaccctgaggtcaagttcaactggtacgtggacggcgtggaggtgcataatgccaagacaaagccgcgggaggagcagtacaacagcacgtaccgtgtggtcagcgtcctcaccgtcctgcaccaggactggctgaatggcaaggagtacaagtgcaaggtgtccaacaaagccctcccagcccccatcgagaaaaccatctccaaagccaaagggcagccccgagaaccacaggtgtacgtgctgcccccatcccgggaggagatgaccaagaaccaggtcagcctgctgtgcctggtcaaaggcttctatcccagcgacatcgccgtggagtgggagagcaatgggcagccggagaacaactacctcacctggcctcccgtgctggactccgacggctccttcttcctctacagcaagctcaccgtggacaagtccagatggcagcaggggaacgtcttctcatgctccgtgatgcatgaggctctgcacaaccactacacgcagaagtctctctccctgtctccgggaaaa

SEQ ID NO: 655 - DNA, 1458 bp, synthetic construct
  misc_feature 1..1458: note = Description of Artificial Sequence: Synthetic polynucleotide
  source 1..1458: mol_type = other DNA
gaggtgcagctgttggagtcaggtccaggactggtgaagccctcgcagaccctctcactcacctgtgtcatctccggggacagtgtctctagcaacagagctgcttggaactggatcaggcagtccccatcgagaggccttgagtggctgggaaggacatactacaggtccaagtggtataatgattatgcagtatctgtgaaaagtcgaataaccatcaattcagacacatccaagaaccagatctccctgcagttgaactctgtgactcccgaggacacggctgtgtattactgtgcaagagtgagaccggggatcccatttgactactggggccagggaaccccggtcaccgtctcctcaggcggatctgagggaaagtccagcggctccggcagcgaaagcaagtccaccggcggaagcgacatcgtgatgacccagtctccagactccctggctgtgtctctgggcgagagggccaccatcaactgcaagtccagccagagtgttttattcagctccaacaaaaagaactacttagcttggtaccagcagaaaccaggacagccccctaagctgctcatttactgggcatctacccgggaatccggggtccctgaccgattcagtggcagcgggtctgggacagatttcactctcaccatcagcagcctgcaggctgaagatgtggcagtttattactgtcagcaatataatagtactccgtggacgttcggccaagggaccaaggtggagatcaaagagcccaaatctagcgacaaaactcacacttgtccaccgtgcccagcacctgaagcagcagggggaccgtcagtcttcctcttccccccaaaacccaaggacaccctcatgatctcccggacccctgaggtcacatgcgtggtggtgagcgtgagccacgaagaccctgaggtcaagttcaactggtacgtggacggcgtggaggtgcataatgccaagacaaagccgcgggaggagcagtacaacagcacgtaccgtgtggtcagcgtcctcaccgtcctgcaccaggactggctgaatggcaaggagtacaagtgcaaggtgtccaacaaagccctcccagcccccatcgagaaaaccatctccaaagccaaagggcagccccgagaaccacaggtgtacgtgctgcccccatcccgggaggagatgaccaagaaccaggtcagcctgctgtgcctggtcaaaggcttctatcccagcgacatcgccgtggagtgggagagcaatgggcagccggagaacaactacctcacctggcctcccgtgctggactccgacggctccttcttcctctacagcaagctcaccgtggacaagtccagatggcagcaggggaacgtcttctcatgctccgtgatgcatgaggctctgcacaaccactacacgcagaagtctctctccctgtctccgggaaaa

SEQ ID NO: 656 - DNA, 1458 bp, synthetic construct
  misc_feature 1..1458: note = Description of Artificial Sequence: Synthetic polynucleotide
  source 1..1458: mol_type = other DNA
gacatcgtgatgacccagtctccagactccctggctgtgtctctgggcgagagggccaccatcaactgcaagtccagccagagtgttttattcagctccaacaaaaagaactacttagcttggtaccagcagaaaccaggacagccccctaagctgctcatttactgggcatctacccgggaatccggggtccctgaccgattcagtggcagcgggtctgggacagatttcactctcaccatcagcagcctgcaggctgaagatgtggcagtttattactgtcagcaatataatagtactccgtggacgttcggccaagggaccaaggtggagatcaaaggcggatctgagggaaagtccagcggctccggcagcgaaagcaagtccaccggcggaagcgaggtgcagctgttggagtcaggtccaggactggtgaagccctcgcagaccctctcactcacctgtgtcatctccggggacagtgtctctagcaacagagctgcttggaactggatcaggcagtccccatcgagaggccttgagtggctgggaaggacatactacaggtccaagtggtataatgattatgcagtatctgtgaaaagtcgaataaccatcaattcagacacatccaagaaccagatctccctgcagttgaactctgtgactcccgaggacacggctgtgtattactgtgcaagagtgagaccggggatcccatttgactactggggccagggaaccccggtcaccgtctcctcagagcccaaatctagcgacaaaactcacacttgtccaccgtgcccagcacctgaagcagcagggggaccgtcagtcttcctcttccccccaaaacccaaggacaccctcatgatctcccggacccctgaggtcacatgcgtggtggtgagcgtgagccacgaagaccctgaggtcaagttcaactggtacgtggacggcgtggaggtgcataatgccaagacaaagccgcgggaggagcagtacaacagcacgtaccgtgtggtcagcgtcctcaccgtcctgcaccaggactggctgaatggcaaggagtacaagtgcaaggtgtccaacaaagccctcccagcccccatcgagaaaaccatctccaaagccaaagggcagccccgagaaccacaggtgtacgtgctgcccccatcccgggaggagatgaccaagaaccaggtcagcctgctgtgcctggtcaaaggcttctatcccagcgacatcgccgtggagtgggagagcaatgggcagccggagaacaactacctcacctggcctcccgtgctggactccgacggctccttcttcctctacagcaagctcaccgtggacaagtccagatggcagcaggggaacgtcttctcatgctccgtgatgcatgaggctctgcacaaccactacacgcagaagtctctctccctgtctccgggaaaa

SEQ ID NO: 657 - DNA, 1458 bp, synthetic construct
  misc_feature 1..1458: note = Description of Artificial Sequence: Synthetic polynucleotide
  source 1..1458: mol_type = other DNA
caggtacagctgcagcagtcaggtccaggactggtgaagccctcgcagaccctctcactcacctgtgtcatctccggggacagtgtctctagcaacagagctgcctggaactggatcaggcagtccccatcgagaggccttgagtggctgggaaggacatactacaggtccaagtggtataatgattatgcagtttctgtgaaaagtcgaataaccatcaattcagacacatccaagaaccagatctccctgcagttgaactctgtgactcccgaggacacggctgtgtattactgtgcaagagtgagaccggggatcccttttgactactggggccagggaaccacggtcaccgtctcctcaggcggatctgagggaaagtccagcggctccggcagcgaaagcaagtccaccggcggaagcgacatccagatgacccagtctccagactccctggctgtgtctctgggcgagagggccaccatcaactgcgagtccagccagagtgttttattcagctccaacaaaaagaactacttagcttggtaccagcagaaaccaggacagccccctaagctgctcatttactgggcatctacccgggaatccggggtccctgaccgattcagtggcagcgggtctgggacagatttcactctcaccatcaaccgcctgcaggctgaagatgtggcagtttattactgtcagcaatataatagtactccgtggacgttcggccaagggaccaaggtggagatcaaagagcccaaatctagcgacaaaactcacacttgtccaccgtgcccagcacctgaagcagcagggggaccgtcagtcttcctcttccccccaaaacccaaggacaccctcatgatctcccggacccctgaggtcacatgcgtggtggtgagcgtgagccacgaagaccctgaggtcaagttcaactggtacgtggacggcgtggaggtgcataatgccaagacaaagccgcgggaggagcagtacaacagcacgtaccgtgtggtcagcgtcctcaccgtcctgcaccaggactggctgaatggcaaggagtacaagtgcaaggtgtccaacaaagccctcccagcccccatcgagaaaaccatctccaaagccaaagggcagccccgagaaccacaggtgtacgtgctgcccccatcccgggaggagatgaccaagaaccaggtcagcctgctgtgcctggtcaaaggcttctatcccagcgacatcgccgtggagtgggagagcaatgggcagccggagaacaactacctcacctggcctcccgtgctggactccgacggctccttcttcctctacagcaagctcaccgtggacaagtccagatggcagcaggggaacgtcttctcatgctccgtgatgcatgaggctctgcacaaccactacacgcagaagtctctctccctgtctccgggaaaa

SEQ ID NO: 658 - DNA, 1458 bp, synthetic construct
  misc_feature 1..1458: note = Description of Artificial Sequence: Synthetic polynucleotide
  source 1..1458: mol_type = other DNA
gacatccagatgacccagtctccagactccctggctgtgtctctgggcgagagggccaccatcaactgcgagtccagccagagtgttttattcagctccaacaaaaagaactacttagcttggtaccagcagaaaccaggacagccccctaagctgctcatttactgggcatctacccgggaatccggggtccctgaccgattcagtggcagcgggtctgggacagatttcactctcaccatcaaccgcctgcaggctgaagatgtggcagtttattactgtcagcaatataatagtactccgtggacgttcggccaagggaccaaggtggagatcaaaggcggatctgagggaaagtccagcggctccggcagcgaaagcaagtccaccggcggaagccaggtacagctgcagcagtcaggtccaggactggtgaagccctcgcagaccctctcactcacctgtgtcatctccggggacagtgtctctagcaacagagctgcctggaactggatcaggcagtccccatcgagaggccttgagtggctgggaaggacatactacaggtccaagtggtataatgattatgcagtttctgtgaaaagtcgaataaccatcaattcagacacatccaagaaccagatctccctgcagttgaactctgtgactcccgaggacacggctgtgtattactgtgcaagagtgagaccggggatcccttttgactactggggccagggaaccacggtcaccgtctcctcagagcccaaatctagcgacaaaactcacacttgtccaccgtgcccagcacctgaagcagcagggggaccgtcagtcttcctcttccccccaaaacccaaggacaccctcatgatctcccggacccctgaggtcacatgcgtggtggtgagcgtgagccacgaagaccctgaggtcaagttcaactggtacgtggacggcgtggaggtgcataatgccaagacaaagccgcgggaggagcagtacaacagcacgtaccgtgtggtcagcgtcctcaccgtcctgcaccaggactggctgaatggcaaggagtacaagtgcaaggtgtccaacaaagccctcccagcccccatcgagaaaaccatctccaaagccaaagggcagccccgagaaccacaggtgtacgtgctgcccccatcccgggaggagatgaccaagaaccaggtcagcctgctgtgcctggtcaaaggcttctatcccagcgacatcgccgtggagtgggagagcaatgggcagccggagaacaactacctcacctggcctcccgtgctggactccgacggctccttcttcctctacagcaagctcaccgtggacaagtccagatggcagcaggggaacgtcttctcatgctccgtgatgcatgaggctctgcacaaccactacacgcagaagtctctctccctgtctccgggaaaa

SEQ ID NO: 659 - DNA, 1437 bp, synthetic construct
  misc_feature 1..1437: note = Description of Artificial Sequence: Synthetic polynucleotide
  source 1..1437: mol_type = other DNA
gaggtgcagctgttggagtctgggggaggcttggtacagcctggggggtccctgagactctcctgtgcagcctctggattcacctttagcagctatgccatgcactgggtccgccaggccccagggaaggggctggactgggtctcaggtattagtggtagtggctttagcacatactatgtagactccgtgaagggccggttcaccatctccagagacaattccaagcacacgctgtatctgcaaatgaacagcctgagagccgaggacacggccgtatattactgtgcgaaagataatttagtggctggtaccgtctttgactactggggccagggaaccctggtcaccgtctcctcaggcggatctgagggaaagtccagcggctccggcagcgaaagcaagtccaccggcggaagcgacatccagatgacccagtctccttccaccctgtctgcatctgtaggagacagagtcaccatcacttgccgggccagtcagagtattagtagctggttggcctggtatcagcagaaaccagggaaagcccctaagctcctgatctataaggcgtctagtttagaaagtggggtcccatcaaggttcagcggcagtggatctgggacagaattcactctcaccatcagcagcctgcagcctgatgattttgcaacttattactgccaacagtataatagttattcgctcactttcggcggagggaccaaggtggatatcaaagagcccaaatctagcgacaaaactcacacttgtccaccgtgcccagcacctgaagcagcagggggaccgtcagtcttcctcttccccccaaaacccaaggacaccctcatgatctcccggacccctgaggtcacatgcgtggtggtgagcgtgagccacgaagaccctgaggtcaagttcaactggtacgtggacggcgtggaggtgcataatgccaagacaaagccgcgggaggagcagtacaacagcacgtaccgtgtggtcagcgtcctcaccgtcctgcaccaggactggctgaatggcaaggagtacaagtgcaaggtgtccaacaaagccctcccagcccccatcgagaaaaccatctccaaagccaaagggcagccccgagaaccacaggtgtacgtgctgcccccatcccgggaggagatgaccaagaaccaggtcagcctgctgtgcctggtcaaaggcttctatcccagcgacatcgccgtggagtgggagagcaatgggcagccggagaacaactacctcacctggcctcccgtgctggactccgacggctccttcttcctctacagcaagctcaccgtggacaagtccagatggcagcaggggaacgtcttctcatgctccgtgatgcatgaggctctgcacaaccactacacgcagaagtctctctccctgtctccgggaaaa

SEQ ID NO: 660 - DNA, 1437 bp, synthetic construct
  misc_feature 1..1437: note = Description of Artificial Sequence: Synthetic polynucleotide
  source 1..1437: mol_type = other DNA
gacatccagatgacccagtctccttccaccctgtctgcatctgtaggagacagagtcaccatcacttgccgggccagtcagagtattagtagctggttggcctggtatcagcagaaaccagggaaagcccctaagctcctgatctataaggcgtctagtttagaaagtggggtcccatcaaggttcagcggcagtggatctgggacagaattcactctcaccatcagcagcctgcagcctgatgattttgcaacttattactgccaacagtataatagttattcgctcactttcggcggagggaccaaggtggatatcaaaggcggatctgagggaaagtccagcggctccggcagcgaaagcaagtccaccggcggaagcgaggtgcagctgttggagtctgggggaggcttggtacagcctggggggtccctgagactctcctgtgcagcctctggattcacctttagcagctatgccatgcactgggtccgccaggccccagggaaggggctggactgggtctcaggtattagtggtagtggctttagcacatactatgtagactccgtgaagggccggttcaccatctccagagacaattccaagcacacgctgtatctgcaaatgaacagcctgagagccgaggacacggccgtatattactgtgcgaaagataatttagtggctggtaccgtctttgactactggggccagggaaccctggtcaccgtctcctcagagcccaaatctagcgacaaaactcacacttgtccaccgtgcccagcacctgaagcagcagggggaccgtcagtcttcctcttccccccaaaacccaaggacaccctcatgatctcccggacccctgaggtcacatgcgtggtggtgagcgtgagccacgaagaccctgaggtcaagttcaactggtacgtggacggcgtggaggtgcataatgccaagacaaagccgcgggaggagcagtacaacagcacgtaccgtgtggtcagcgtcctcaccgtcctgcaccaggactggctgaatggcaaggagtacaagtgcaaggtgtccaacaaagccctcccagcccccatcgagaaaaccatctccaaagccaaagggcagccccgagaaccacaggtgtacgtgctgcccccatcccgggaggagatgaccaagaaccaggtcagcctgctgtgcctggtcaaaggcttctatcccagcgacatcgccgtggagtgggagagcaatgggcagccggagaacaactacctcacctggcctcccgtgctggactccgacggctccttcttcctctacagcaagctcaccgtggacaagtccagatggcagcaggggaacgtcttctcatgctccgtgatgcatgaggctctgcacaaccactacacgcagaagtctctctccctgtctccgggaaaa

SEQ ID NO: 661 - DNA, 1470 bp, synthetic construct
  misc_feature 1..1470: note = Description of Artificial Sequence: Synthetic polynucleotide
  source 1..1470: mol_type = other DNA
caagtacaactgcaacaaagtggtcctgggctcgtgaagccttcccagactctcagcctcacatgcgctataagtggggattctgtttcctcaaattcagcagcctggaattggatacgacagtctccatcccgtggccttgagtggcttggtagaacttattaccgatccaagtggtacaatgattacgccgtttcagtgaagtcccgcattactattaatcccgacacatctaagaatcaaatttcattgcaactgaatagcgtaacacccgaagatacagcagtttattattgtgcaggtgatcgacgctacggcatagtgggacttcctttcgcctattggggccaagggacactggtcactgtgtcatccggcggatctgagggaaagtccagcggctccggcagcgaaagcaagtccaccggcggaagcgacatcgtaatgacacagtcaccagattcattggcagttagtctgggtgaaagggcaacaatcaactgcaagtcttctcagagtgtactgcatagttctaacaataagaactaccttacctggtttcaacagaaaccaggtcagccccccaagttgctgatttactgggcaagcacccgcgaatccggcgttcccgatcgattttcaggttccgggagtgggaccgactttaccttgaccatctcttccttgcaggccgaagatgtagccgtctattactgccatcagtattactctactccccccacattcggtcaaggtacaaaagttgagataaaagagcccaaatctagcgacaaaactcacacttgtccaccgtgcccagcacctgaagcagcagggggaccgtcagtcttcctcttccccccaaaacccaaggacaccctcatgatctcccggacccctgaggtcacatgcgtggtggtgagcgtgagccacgaagaccctgaggtcaagttcaactggtacgtggacggcgtggaggtgcataatgccaagacaaagccgcgggaggagcagtacaacagcacgtaccgtgtggtcagcgtcctcaccgtcctgcaccaggactggctgaatggcaaggagtacaagtgcaaggtgtccaacaaagccctcccagcccccatcgagaaaaccatctccaaagccaaagggcagccccgagaaccacaggtgtacgtgctgcccccatcccgggaggagatgaccaagaaccaggtcagcctgctgtgcctggtcaaaggcttctatcccagcgacatcgccgtggagtgggagagcaatgggcagccggagaacaactacctcacctggcctcccgtgctggactccgacggctccttcttcctctacagcaagctcaccgtggacaagtccagatggcagcaggggaacgtcttctcatgctccgtgatgcatgaggctctgcacaaccactacacgcagaagtctctctccctgtctccgggaaaa

SEQ ID NO: 662 - DNA, 1470 bp, synthetic construct
  misc_feature 1..1470: note = Description of Artificial Sequence: Synthetic polynucleotide
  source 1..1470: mol_type = other DNA
gacatcgtaatgacacagtcaccagattcattggcagttagtctgggtgaaagggcaacaatcaactgcaagtcttctcagagtgtactgcatagttctaacaataagaactaccttacctggtttcaacagaaaccaggtcagccccccaagttgctgatttactgggcaagcacccgcgaatccggcgttcccgatcgattttcaggttccgggagtgggaccgactttaccttgaccatctcttccttgcaggccgaagatgtagccgtctattactgccatcagtattactctactccccccacattcggtcaaggtacaaaagttgagataaaaggcggatctgagggaaagtccagcggctccggcagcgaaagcaagtccaccggcggaagccaagtacaactgcaacaaagtggtcctgggctcgtgaagccttcccagactctcagcctcacatgcgctataagtggggattctgtttcctcaaattcagcagcctggaattggatacgacagtctccatcccgtggccttgagtggcttggtagaacttattaccgatccaagtggtacaatgattacgccgtttcagtgaagtcccgcattactattaatcccgacacatctaagaatcaaatttcattgcaactgaatagcgtaacacccgaagatacagcagtttattattgtgcaggtgatcgacgctacggcatagtgggacttcctttcgcctattggggccaagggacactggtcactgtgtcatccgagcccaaatctagcgacaaaactcacacttgtccaccgtgcccagcacctgaagcagcagggggaccgtcagtcttcctcttccccccaaaacccaaggacaccctcatgatctcccggacccctgaggtcacatgcgtggtggtgagcgtgagccacgaagaccctgaggtcaagttcaactggtacgtggacggcgtggaggtgcataatgccaagacaaagccgcgggaggagcagtacaacagcacgtaccgtgtggtcagcgtcctcaccgtcctgcaccaggactggctgaatggcaaggagtacaagtgcaaggtgtccaacaaagccctcccagcccccatcgagaaaaccatctccaaagccaaagggcagccccgagaaccacaggtgtacgtgctgcccccatcccgggaggagatgaccaagaaccaggtcagcctgctgtgcctggtcaaaggcttctatcccagcgacatcgccgtggagtgggagagcaatgggcagccggagaacaactacctcacctggcctcccgtgctggactccgacggctccttcttcctctacagcaagctcaccgtggacaagtccagatggcagcaggggaacgtcttctcatgctccgtgatgcatgaggctctgcacaaccactacacgcagaagtctctctccctgtctccgggaaaa

SEQ ID NO: 663 - DNA, 1437 bp, synthetic construct
  misc_feature 1..1437: note = Description of Artificial Sequence: Synthetic polynucleotide
  source 1..1437: mol_type = other DNA
gaggtgcaactccttgaatcaggcggaggactcgtccaacctggagggagtcttaggcttagctgtgcagccagtggctttacttttagcagctatgcaatgcactgggtcaggcaggctcctggtaaggggctcgaatgggtcagcggcatatccgggtcaggtttctctacatattatgtcgattctgtaaaaggacgattcaccatatccagagacaattctaaaaataccttgtatctccagatgaacagcctgagagcagaagataccgcagtttattactgtgcaaaggataatctggttgccgggacagtttttgattattgggggcaaggcaccctcgtcacagtatccagtggcggatctgagggaaagtccagcggctccggcagcgaaagcaagtccaccggcggaagcgatattcagatgactcaatcaccttcaacccttagcgcctccgttggagatcgcgttaccattacctgccgagcctcccaaagtatcagctcatggttggcatggtatcaacagaagcctggaaaggcacccaaacttctgatttacaaagccagctccttggagtcaggagtcccaagccggttcagcggatctgggtcagggacagaatttaccctgaccatatcttcccttcagcccgacgacttcgccacttactattgtcagcaatacaactcctattccctgactttcggcggtggcacaaaggttgacatcaaggagcccaaatctagcgacaaaactcacacttgtccaccgtgcccagcacctgaagcagcagggggaccgtcagtcttcctcttccccccaaaacccaaggacaccctcatgatctcccggacccctgaggtcacatgcgtggtggtgagcgtgagccacgaagaccctgaggtcaagttcaactggtacgtggacggcgtggaggtgcataatgccaagacaaagccgcgggaggagcagtacaacagcacgtaccgtgtggtcagcgtcctcaccgtcctgcaccaggactggctgaatggcaaggagtacaagtgcaaggtgtccaacaaagccctcccagcccccatcgagaaaaccatctccaaagccaaagggcagccccgagaaccacaggtgtacgtgctgcccccatcccgggaggagatgaccaagaaccaggtcagcctgctgtgcctggtcaaaggcttctatcccagcgacatcgccgtggagtgggagagcaatgggcagccggagaacaactacctcacctggcctcccgtgctggactccgacggctccttcttcctctacagcaagctcaccgtggacaagtccagatggcagcaggggaacgtcttctcatgctccgtgatgcatgaggctctgcacaaccactacacgcagaagtctctctccctgtctccgggaaaa

SEQ ID NO: 664 - DNA, 1437 bp, synthetic construct
  misc_feature 1..1437: note = Description of Artificial Sequence: Synthetic polynucleotide
  source 1..1437: mol_type = other DNA
gatattcagatgactcaatcaccttcaacccttagcgcctccgttggagatcgcgttaccattacctgccgagcctcccaaagtatcagctcatggttggcatggtatcaacagaagcctggaaaggcacccaaacttctgatttacaaagccagctccttggagtcaggagtcccaagccggttcagcggatctgggtcagggacagaatttaccctgaccatatcttcccttcagcccgacgacttcgccacttactattgtcagcaatacaactcctattccctgactttcggcggtggcacaaaggttgacatcaagggcggatctgagggaaagtccagcggctccggcagcgaaagcaagtccaccggcggaagcgaggtgcaactccttgaatcaggcggaggactcgtccaacctggagggagtcttaggcttagctgtgcagccagtggctttacttttagcagctatgcaatgcactgggtcaggcaggctcctggtaaggggctcgaatgggtcagcggcatatccgggtcaggtttctctacatattatgtcgattctgtaaaaggacgattcaccatatccagagacaattctaaaaataccttgtatctccagatgaacagcctgagagcagaagataccgcagtttattactgtgcaaaggataatctggttgccgggacagtttttgattattgggggcaaggcaccctcgtcacagtatccagtgagcccaaatctagcgacaaaactcacacttgtccaccgtgcccagcacctgaagcagcagggggaccgtcagtcttcctcttccccccaaaacccaaggacaccctcatgatctcccggacccctgaggtcacatgcgtggtggtgagcgtgagccacgaagaccctgaggtcaagttcaactggtacgtggacggcgtggaggtgcataatgccaagacaaagccgcgggaggagcagtacaacagcacgtaccgtgtggtcagcgtcctcaccgtcctgcaccaggactggctgaatggcaaggagtacaagtgcaaggtgtccaacaaagccctcccagcccccatcgagaaaaccatctccaaagccaaagggcagccccgagaaccacaggtgtacgtgctgcccccatcccgggaggagatgaccaagaaccaggtcagcctgctgtgcctggtcaaaggcttctatcccagcgacatcgccgtggagtgggagagcaatgggcagccggagaacaactacctcacctggcctcccgtgctggactccgacggctccttcttcctctacagcaagctcaccgtggacaagtccagatggcagcaggggaacgtcttctcatgctccgtgatgcatgaggctctgcacaaccactacacgcagaagtctctctccctgtctccgggaaaa

SEQ ID NO: 665 - DNA, 1458 bp, synthetic construct
  misc_feature 1..1458: note = Description of Artificial Sequence: Synthetic polynucleotide
  source 1..1458: mol_type = other DNA
caggtgcagcttcaacagagcggacctggtctggttaagccttcccaaaccctgagcctgacttgtgctatttccggggatagtgttagctccaatagggcagcatggaactggatcagacagtccccaagccgtggacttgagtggcttggacgtacttattacaggagtaaatggtacaatgattatgccgtttctgtgaagagccgtattactataaacccagatacttctaaaaatcaaatttcccttcagctcaactcagttacaccagaggatactgcagtctattattgcgcaagagttcgacctggcattcccttcgattattgggggcaggggacacccgttactgtgtcctcaggcggatctgagggaaagtccagcggctccggcagcgaaagcaagtccaccggcggaagcgatattgttatgacacagtccccagattcattggcagtaagcctcggtgaacgggctactattaactgtaagtcttcccagagtgtattgttctcttcaaataacaaaaactacctggcatggtatcagcaaaagcctggtcaaccccctaaacttctcatatactgggcatccactcgggagagcggtgtgccagaccgtttctcagggagtgtgtcaggtacagattttacactcacaatttccagcctccaagccgaagacgttgcagtatattattgccaacaatatcactctacaccttggacatttggtcaaggtactaaagtcgaaatcaaagagcccaaatctagcgacaaaactcacacttgtccaccgtgcccagcacctgaagcagcagggggaccgtcagtcttcctcttccccccaaaacccaaggacaccctcatgatctcccggacccctgaggtcacatgcgtggtggtgagcgtgagccacgaagaccctgaggtcaagttcaactggtacgtggacggcgtggaggtgcataatgccaagacaaagccgcgggaggagcagtacaacagcacgtaccgtgtggtcagcgtcctcaccgtcctgcaccaggactggctgaatggcaaggagtacaagtgcaaggtgtccaacaaagccctcccagcccccatcgagaaaaccatctccaaagccaaagggcagccccgagaaccacaggtgtacgtgctgcccccatcccgggaggagatgaccaagaaccaggtcagcctgctgtgcctggtcaaaggcttctatcccagcgacatcgccgtggagtgggagagcaatgggcagccggagaacaactacctcacctggcctcccgtgctggactccgacggctccttcttcctctacagcaagctcaccgtggacaagtccagatggcagcaggggaacgtcttctcatgctccgtgatgcatgaggctctgcacaaccactacacgcagaagtctctctccctgtctccgggaaaa

SEQ ID NO: 666 - DNA, 1458 bp, synthetic construct
  misc_feature 1..1458: note = Description of Artificial Sequence: Synthetic polynucleotide
  source 1..1458: mol_type = other DNA
gatattgttatgacacagtccccagattcattggcagtaagcctcggtgaacgggctactattaactgtaagtcttcccagagtgtattgttctcttcaaataacaaaaactacctggcatggtatcagcaaaagcctggtcaaccccctaaacttctcatatactgggcatccactcgggagagcggtgtgccagaccgtttctcagggagtgtgtcaggtacagattttacactcacaatttccagcctccaagccgaagacgttgcagtatattattgccaacaatatcactctacaccttggacatttggtcaaggtactaaagtcgaaatcaaaggcggatctgagggaaagtccagcggctccggcagcgaaagcaagtccaccggcggaagccaggtgcagcttcaacagagcggacctggtctggttaagccttcccaaaccctgagcctgacttgtgctatttccggggatagtgttagctccaatagggcagcatggaactggatcagacagtccccaagccgtggacttgagtggcttggacgtacttattacaggagtaaatggtacaatgattatgccgtttctgtgaagagccgtattactataaacccagatacttctaaaaatcaaatttcccttcagctcaactcagttacaccagaggatactgcagtctattattgcgcaagagttcgacctggcattcccttcgattattgggggcaggggacacccgttactgtgtcctcagagcccaaatctagcgacaaaactcacacttgtccaccgtgcccagcacctgaagcagcagggggaccgtcagtcttcctcttccccccaaaacccaaggacaccctcatgatctcccggacccctgaggtcacatgcgtggtggtgagcgtgagccacgaagaccctgaggtcaagttcaactggtacgtggacggcgtggaggtgcataatgccaagacaaagccgcgggaggagcagtacaacagcacgtaccgtgtggtcagcgtcctcaccgtcctgcaccaggactggctgaatggcaaggagtacaagtgcaaggtgtccaacaaagccctcccagcccccatcgagaaaaccatctccaaagccaaagggcagccccgagaaccacaggtgtacgtgctgcccccatcccgggaggagatgaccaagaaccaggtcagcctgctgtgcctggtcaaaggcttctatcccagcgacatcgccgtggagtgggagagcaatgggcagccggagaacaactacctcacctggcctcccgtgctggactccgacggctccttcttcctctacagcaagctcaccgtggacaagtccagatggcagcaggggaacgtcttctcatgctccgtgatgcatgaggctctgcacaaccactacacgcagaagtctctctccctgtctccgggaaaa

SEQ ID NO: 667 - protein, 8 aa, synthetic construct
  REGION 1..8: note = Description of Artificial Sequence: Synthetic peptide
HHPVFDYE

SEQ ID NO: 668 - protein, 454 aa, synthetic construct
  REGION 1..454: note = Description of Artificial Sequence: Synthetic polypeptide
QVQLQQSGPGLVKPSQTLSLTCAISGDSVSSNSAAWNWIRQSPSRGLEWLGRTYYRSKWYNDYAVSVKSRITINPDTSKNQISLQLNSVTPEDTAVYYCAGDRRYGIVGLPFAYWGQGTLVTVSSASTKGPSVFPLAPSSKSTSGGTAALGCLVKDYFPEPVTVSWNSGALTSGVHTFPAVLQSSGLYSLSSVVTVPSSSLGTQTYICNVNHKPSNTKVDKKVEPKSCDKTHTCPPCPAPEAAGGPSVFLFPPKPKDTLMISRTPEVTCVVVSVSHEDPEVKFNWYVDGVEVHNAKTKPREEQYNSTYRVVSVLTVLHQDWLNGKEYKCKVSNKALPAPIEKTISKAKGQPREPQVYVLPPSREEMTKNQVSLLCLVKGFYPSDIAVEWESNGQPENNYLTWPPVLDSDGSFFLYSKLTVDKSRWQQGNVFSCSVMHEALHNHYTQKSLSLSPG

SEQ ID NO: 669 - protein, 450 aa, synthetic construct
  REGION 1..450: note = Description of Artificial Sequence: Synthetic polypeptide
QVQLQQSGPGLVKPSQTLSLTCAISGDSVSSNRAAWNWIRQSPSRGLEWLGRTYYRSKWYNDYAVSVKSRITINPDTSKNQISLQLNSVTPEDTAVYYCARVRPGIPFDYWGQGTPVTVSSASTKGPSVFPLAPSSKSTSGGTAALGCLVKDYFPEPVTVSWNSGALTSGVHTFPAVLQSSGLYSLSSVVTVPSSSLGTQTYICNVNHKPSNTKVDKKVEPKSCDKTHTCPPCPAPEAAGGPSVFLFPPKPKDTLMISRTPEVTCVVVSVSHEDPEVKFNWYVDGVEVHNAKTKPREEQYNSTYRVVSVLTVLHQDWLNGKEYKCKVSNKALPAPIEKTISKAKGQPREPQVYVLPPSREEMTKNQVSLLCLVKGFYPSDIAVEWESNGQPENNYLTWPPVLDSDGSFFLYSKLTVDKSRWQQGNVFSCSVMHEALHNHYTQKSLSLSPG

SEQ ID NO: 670 - protein, 450 aa, synthetic construct; identical to SEQ ID NO: 669
  REGION 1..450: note = Description of Artificial Sequence: Synthetic polypeptide

SEQ ID NO: 671 - protein, 220 aa, synthetic construct; identical to SEQ ID NO: 546
  REGION 1..220: note = Description of Artificial Sequence: Synthetic polypeptide

SEQ ID NO: 672 - protein, 220 aa, synthetic construct; identical to SEQ ID NO: 556
  REGION 1..220: note = Description of Artificial Sequence: Synthetic polypeptide

SEQ ID NO: 673 - protein, 220 aa, synthetic construct; identical to SEQ ID NO: 556
  REGION 1..220: note = Description of Artificial Sequence: Synthetic polypeptide

SEQ ID NO: 674 - DNA, 1362 bp, synthetic construct
  misc_feature 1..1362: note = Description of Artificial Sequence: Synthetic polynucleotide
  source 1..1362: mol_type = other DNA
caagtacaactgcaacaaagtggtcctgggctcgtgaagccttcccagactctcagcctcacatgcgctataagtggggattctgtttcctcaaattcagcagcctggaattggatacgacagtctccatcccgtggccttgagtggcttggtagaacttattaccgatccaagtggtacaatgattacgccgtttcagtgaagtcccgcattactattaatcccgacacatctaagaatcaaatttcattgcaactgaatagcgtaacacccgaagatacagcagtttattattgtgcaggtgatcgacgctacggcatagtgggacttcctttcgcctattggggccaagggacactggtcactgtgtcatccgcctccaccaagggcccatcggtcttccccctggcaccctcctccaagagcacctctgggggcacagcggccctgggctgcctggtcaaggactacttccccgaaccggtgacggtgtcgtggaactcaggcgccctgaccagcggcgtgcacaccttcccggctgtcctacagtcctcaggactctactccctcagcagcgtggtgaccgtgccctccagcagcttgggcacccagacctacatctgcaacgtgaatcacaagcccagcaacaccaaggtggacaagaaagttgagcccaaatcttgtgacaaaactcacacatgtccaccgtgcccagcacctgaagcagcagggggaccgtcagtcttcctcttccccccaaaacccaaggacaccctcatgatctcccggacccctgaggtcacatgcgtggtggtgagcgtgagccacgaagaccctgaggtcaagttcaactggtacgtggacggcgtggaggtgcataatgccaagacaaagccgcgggaggagcagtacaacagcacgtaccgtgtggtcagcgtcctcaccgtcctgcaccaggactggctgaatggcaaggagtacaagtgcaaggtctccaacaaagccctcccagcccccatcgagaaaaccatctccaaagccaaagggcagccccgagaaccacaggtgtacgtgctgcccccatcccgggaggagatgaccaagaaccaggtcagcctgctgtgcctggtcaaaggcttctatcccagcgacatcgccgtggagtgggagagcaatgggcagccggagaacaactacctcacctggcctcccgtgctggactccgacggctccttcttcctctacagcaagctcaccgtggacaagtctagatggcagcaggggaacgtcttctcatgctccgtgatgcatgaggctctgcacaaccactacacgcagaagagcctctccctgtctccgggt

SEQ ID NO: 675 - DNA, 660 bp, synthetic construct; identical to SEQ ID NO: 574
  misc_feature 1..660: note = Description of Artificial Sequence: Synthetic polynucleotide
  source 1..660: mol_type = other DNA

SEQ ID NO: 676 - DNA, 1350 bp, synthetic construct
  misc_feature 1..1350: note = Description of Artificial Sequence: Synthetic polynucleotide
  source 1..1350: mol_type = other DNA
caggtgcagcttcaacagagcggacctggtctggttaagccttcccaaaccctgagcctgacttgtgctatttccggggatagtgttagctccaatagggcagcatggaactggatcagacagtccccaagccgtggacttgagtggcttggacgtacttattacaggagtaaatggtacaatgattatgccgtttctgtgaagagccgtattactataaacccagatacttctaaaaatcaaatttcccttcagctcaactcagttacaccagaggatactgcagtctattattgcgcaagagttcgacctggcattcccttcgattattgggggcaggggacacccgttactgtgtcctcagcctccaccaagggcccatcggtcttccccctggcaccctcctccaagagcacctctgggggcacagcggccctgggctgcctggtcaaggactacttccccgaaccggtgacggtgtcgtggaactcaggcgccctgaccagcggcgtgcacaccttcccggctgtcctacagtcctcaggactctactccctcagcagcgtggtgaccgtgccctccagcagcttgggcacccagacctacatctgcaacgtgaatcacaagcccagcaacaccaaggtggacaagaaagttgagcccaaatcttgtgacaaaactcacacatgtccaccgtgcccagcacctgaagcagcagggggaccgtcagtcttcctcttccccccaaaacccaaggacaccctcatgatctcccggacccctgaggtcacatgcgtggtggtgagcgtgagccacgaagaccctgaggtcaagttcaactggtacgtggacggcgtggaggtgcataatgccaagacaaagccgcgggaggagcagtacaacagcacgtaccgtgtggtcagcgtcctcaccgtcctgcaccaggactggctgaatggcaaggagtacaagtgcaaggtctccaacaaagccctcccagcccccatcgagaaaaccatctccaaagccaaagggcagccccgagaaccacaggtgtacgtgctgcccccatcccgggaggagatgaccaagaaccaggtcagcctgctgtgcctggtcaaaggcttctatcccagcgacatcgccgtggagtgggagagcaatgggcagccggagaacaactacctcacctggcctcccgtgctggactccgacggctccttcttcctctacagcaagctcaccgtggacaagtctagatggcagcaggggaacgtcttctcatgctccgtgatgcatgaggctctgcacaaccactacacgcagaagagcctctccctgtctccgggt

SEQ ID NO: 677 - DNA, 660 bp, synthetic construct; identical to SEQ ID NO: 578
  misc_feature 1..660: note = Description of Artificial Sequence: Synthetic polynucleotide
  source 1..660: mol_type = other DNA

SEQ ID NO: 678 - DNA, 1350 bp, synthetic construct; identical to SEQ ID NO: 676
  misc_feature 1..1350: note = Description of Artificial Sequence: Synthetic polynucleotide
  source 1..1350: mol_type = other DNA

SEQ ID NO: 679 - DNA, 660 bp, synthetic construct; identical to SEQ ID NO: 578
  misc_feature 1..660: note = Description of Artificial Sequence: Synthetic polynucleotide
  source 1..660: mol_type = other DNA

SEQ ID NO: 680 - protein, 489 aa, synthetic construct
  REGION 1..489: note = Description of Artificial Sequence: Synthetic polypeptide
DIVMTQSPDSLAVSLGERATINCKSSQSVLHSSNNKNYLTWFQQKPGQPPKLLIYWASTRESGVPDRFSGSGSGTDFTLTISSLQAEDVAVYYCHQYYSTPPTFGQGTKVEIKGGSEGKSSGSGSESKSTGGSQVQLQQSGPGLVKPSQTLSLTCAISGDSVSSNSAAWNWIRQSPSRGLEWLGRTYYRSKWYNDYAVSVKSRITINPDTSKNQISLQLNSVTPEDTAVYYCAGDRRYGIVGLPFAYWGQGTLVTVSSEPKSSDKTHTCPPCPAPEAAGGPSVFLFPPKPKDTLMISRTPEVTCVVVSVSHEDPEVKFNWYVDGVEVHNAKTKPREEQYNSTYRVVSVLTVLHQDWLNGKEYKCKVSNKALPAPIEKTISKAKGQPREPQVYVLPPSREEMTKNQVSLLCLVKGFYPSDIAVEWESNGQPENNYLTWPPVLDSDGSFFLYSKLTVDKSRWQQGNVFSCSVMHEALHNHYTQKSLSLSPG

SEQ ID NO: 681 - protein, 478 aa, synthetic construct
  REGION 1..478: note = Description of Artificial Sequence: Synthetic polypeptide
DIQMTQSPSTLSASVGDRVTITCRASQSISSWLAWYQQKPGKAPKLLIYKASSLESGVPSRFSGSGSGTEFTLTISSLQPDDFATYYCQQYNSYSLTFGGGTKVDIKGGSEGKSSGSGSESKSTGGSEVQLLESGGGLVQPGGSLRLSCAASGFTFSSYAMHWVRQAPGKGLEWVSGISGSGFSTYYVDSVKGRFTISRDNSKNTLYLQMNSLRAEDTAVYYCAKDNLVAGTVFDYWGQGTLVTVSSEPKSSDKTHTCPPCPAPEAAGGPSVFLFPPKPKDTLMISRTPEVTCVVVSVSHEDPEVKFNWYVDGVEVHNAKTKPREEQYNSTYRVVSVLTVLHQDWLNGKEYKCKVSNKALPAPIEKTISKAKGQPREPQVYVLPPSREEMTKNQVSLLCLVKGFYPSDIAVEWESNGQPENNYLTWPPVLDSDGSFFLYSKLTVDKSRWQQGNVFSCSVMHEALHNHYTQKSLSLSPG

SEQ ID NO: 682 - DNA, 1467 bp, synthetic construct
  misc_feature 1..1467: note = Description of Artificial Sequence: Synthetic polynucleotide
  source 1..1467: mol_type = other DNA
gacatcgtgatgacccagtctccagacagcctggctgtgtctctgggcgagagagctaccatcaactgcaagtccagccagtccgtgctgcactcctccaacaacaagaactacctgacctggttccagcagaagcccggccagcctcctaagctgctgatctactgggcctccacccgcgagtctggtgtgcccgatagattctccggctctggctctggcaccgactttaccctgacaatcagctccctgcaggccgaggatgtggccgtgtactactgccaccagtactacagcacccctcctacctttggccagggcaccaaggtggaaatcaagggcggatctgagggaaagtccagcggctccggcagcgaaagcaagtccaccggcggaagccaggttcagctgcagcagtctggccctggactggtcaagccctctcagaccctgtctctgacctgtgccatctccggcgactccgtgtcctctaattctgccgcctggaactggatccggcagtctcctagtagaggcctggaatggctgggcagaacctactaccggtccaagtggtacaacgactacgccgtgtccgtgaagtcccggatcaccatcaatcccgacacctccaagaaccagatctccctgcagctcaacagcgtgacccctgaggataccgccgtgtactactgtgccggcgatcggagatatggcatcgtgggcctgccttttgcttactggggacagggcacactggtcaccgtttcttctgagcccaaatctagcgacaaaactcacacttgtccaccgtgcccagcacctgaagcagcagggggaccgtcagtcttcctcttccccccaaaacccaaggacaccctcatgatctcccggacccctgaggtcacatgcgtggtggtgagcgtgagccacgaagaccctgaggtcaagttcaactggtacgtggacggcgtggaggtgcataatgccaagacaaagccgcgggaggagcagtacaacagcacgtaccgtgtggtcagcgtcctcaccgtcctgcaccaggactggctgaatggcaaggagtacaagtgcaaggtgtccaacaaagccctcccagcccccatcgagaaaaccatctccaaagccaaagggcagccccgagaaccacaggtgtacgtgctgcccccatcccgggaggagatgaccaagaaccaggtcagcctgctgtgcctggtcaaaggcttctatcccagcgacatcgccgtggagtgggagagcaatgggcagccggagaacaactacctcacctggcctcccgtgctggactccgacggctccttcttcctctacagcaagctcaccgtggacaagtccagatggcagcaggggaacgtcttctcatgctccgtgatgcatgaggctctgcacaaccactacacgcagaagtctctctccctgtctccggga

SEQ ID NO: 683 - DNA, 1434 bp, synthetic construct
  misc_feature 1..1434: note = Description of Artificial Sequence: Synthetic polynucleotide
  source 1..1434: mol_type = other DNA
gatattcagatgacccaatcccccagtacccttagtgctagtgtgggagaccgagtgaccattacctgcagagcatcccaatccataagctcctggctcgcctggtatcagcaaaagccaggcaaggcacctaagctgcttatttacaaagcatcctcattggagtccggcgtaccctcacgtttctctggctcaggctccgggacagagtttacattgaccatctctagccttcagccagatgactttgctacatactattgtcaacaatataacagctactctctgaccttcgggggtgggaccaaagtggatattaaaggcggctccgagggcaagagcagcggcagcggcagcgagagcaagagcaccggcggcagcgaagtccaacttcttgagagtggtggtggcctcgtccagccaggaggttctctccggctctcatgtgctgcaagtggctttactttcagctcttacgccatgcactgggtgcgacaggctcccgggaagggtcttgagtgggtgtctggtataagtggttcaggcttttcaacctactatgtcgattccgtcaagggccggtttacaatttcaagggacaattctaagaatacactgtatctccaaatgaatagtctcagagccgaagataccgccgtttactactgcgccaaagataatcttgtggctgggactgtcttcgactattggggtcagggtacattggtaaccgtaagtagtgagcccaaatctagcgacaaaactcacacatgtccaccgtgcccagcacctgaagcagcagggggaccgtcagtcttcctcttccccccaaaacccaaggacaccctcatgatctcccggacccctgaggtcacatgcgtggtggtgagcgtgagccacgaagaccctgaggtcaagttcaactggtacgtggacggcgtggaggtgcataatgccaagacaaagccgcgggaggagcagtacaacagcacgtaccgtgtggtcagcgtcctcaccgtcctgcaccaggactggctgaatggcaaggagtacaagtgcaaggtctccaacaaagccctcccagcccccatcgagaaaaccatctccaaagccaaagggcagccccgagaaccacaggtgtacgtgctgcccccatcccgggaggagatgaccaagaaccaggtcagcctgctgtgcctggtcaaaggcttctatcccagcgacatcgccgtggagtgggagagcaatgggcagccggagaacaactacctcacctggcctcccgtgctggactccgacggctccttcttcctctacagcaagctcaccgtggacaagtctagatggcagcaggggaacgtcttctcatgctccgtgatgcatgaggctctgcacaaccactacacgcagaagagcctctccctgtctccgggt

SEQ ID NO: 684 - protein, 481 aa, synthetic construct
  REGION 1..481: note = Description of Artificial Sequence: Synthetic polypeptide
QSALTQPASVSGSPGQSITISCTGTSSNIGTYKFVSWYQQHPGKAPKVMIYEVSKRPSGVSNRFSGSKSGNTASLTISGLQAEDEADYYCVSYAGSGTLLFGGGTKLTVLGGSEGKSSGSGSESKSTGGSQVQLQQSGPGLVKPSQTLSLTCAISGDSVFNNNAAWSWIRQSPSRGLEWLGRTYYRSKWLYDYAVSVKSRITINPDTSKNQFSLQLNSVTPEDTAVYYCARGYSSSFDYWGQGTLVTVSSEPKSSDKTHTCPPCPAPEAAGGPSVFLFPPKPKDTLMISRTPEVTCVVVSVSHEDPEVKFNWYVDGVEVHNAKTKPREEQYNSTYRVVSVLTVLHQDWLNGKEYKCKVSNKALPAPIEKTISKAKGQPREPQVYVYPPSREEMTKNQVSLTCLVKGFYPSDIAVEWESNGQPENNYKTTPPVLDSDGSFALVSKLTVDKSRWQQGNVFSCSVMHEALHNHYTQKSLSLSPG

SEQ ID NO: 685 - protein, 485 aa, synthetic construct
  REGION 1..485: note = Description of Artificial Sequence: Synthetic polypeptide
QTVVTQEPSLTVSPGGTVTLTCRSSTGAVTTSNYANWVQQKPGQAPRGLIGGTNKRAPGTPARFSGSLLGGKAALTLSGVQPEDEAEYYCALWYSNLWVFGGGTKLTVLGGSEGKSSGSGSESKSTGGSEVQLVESGGGLVQPGGSLRLSCAASGFTFNTYAMNWVRQAPGKGLEWVARIRSKYNNYATYYAASVKGRFTISRDDSKNSLYLQMNSLKTEDTAVYYCVRHGNFGNSYVSWFAYWGQGTLVTVSSEPKSSDKTHTCPPCPAPEAAGGPSVFLFPPKPKDTLMISRTPEVTCVVVSVSHEDPEVKFNWYVDGVEVHNAKTKPREEQYNSTYRVVSVLTVLHQDWLNGKEYKCKVSNKALPAPIEKTISKAKGQPREPQVYVYPPSREEMTKNQVSLTCLVKGFYPSDIAVEWESNGQPENNYKTTPPVLDSDGSFALVSKLTVDKSRWQQGNVFSCSVMHEALHNHYTQKSLSLSPG

SEQ ID NO: 686 - protein, 475 aa, synthetic construct
  REGION 1..475: note = Description of Artificial Sequence: Synthetic polypeptide
DIQMTQSPSSLSASVGDRVTITCRASQSISSYLNWYQQKPGCAPKLLIYAASSLQSGVPSRFSGSGSGTDFTLTISSLQPEDFATYYCQQSYSTPLTFGQGTKVEIKGGGSGGSGGCPPCGGSGGEVQLLESGGGLVQPGGSLRLSCAASGFTFSSYAMSWVRQAPGKGLEWVSAISGSGGSTYYADSVKGRFTISRDNSKNTLYLQMNSLRAEDTAVYYCAKYDGIYGELDFWGCGTLVTVSSEPKSSDKTHTCPPCPAPEAAGGPSVFLFPPKPKDTLMISRTPEVTCVVVSVSHEDPEVKFNWYVDGVEVHNAKTKPREEQYNSTYRVVSVLTVLHQDWLNGKEYKCKVSNKALPAPIEKTISKAKGQPREPQVYVYPPSREEMTKNQVSLTCLVKGFYPSDIAVEWESNGQPENNYKTTPPVLDSDGSFALVSKLTVDKSRWQQGNVFSCSVMHEALHNHYTQKSLSLSPG

SEQ ID NO: 687 - protein, 449 aa, synthetic construct
  REGION 1..449: note = Description of Artificial Sequence: Synthetic polypeptide
QITLKESGPTLVKPTQTLTLTCTFSGFSLSTSGMGVSWIRQPPGKALEWLAHIYWDDDKRYNPSLKSRLTITKDTSKNQVVLTMTNMDPVDTATYYCARLYGFTYGFAYWGQGTLVTVSSASTKGPSVFPLAPSSKSTSGGTAALGCLVKDYFPEPVTVSWNSGALTSGVHTFPAVLQSSGLYSLSSVVTVPSSSLGTQTYICNVNHKPSNTKVDKKVEPKSCDKTHTCPPCPAPEAAGGPSVFLFPPKPKDTLMISRTPEVTCVVVSVSHEDPEVKFNWYVDGVEVHNAKTKPREEQYNSTYRVVSVLTVLHQDWLNGKEYKCKVSNKALPAPIEKTISKAKGQPREPQVYVYPPSREEMTKNQVSLTCLVKGFYPSDIAVEWESNGQPENNYKTTPPVLDSDGSFALVSKLTVDKSRWQQGNVFSCSVMHEALHNHYTQKSLSLSPG

SEQ ID NO: 688 - protein, 218 aa, synthetic construct
  REGION 1..218: note = Description of Artificial Sequence: Synthetic polypeptide
DIVMTQSPDSLAVSLGERATINCRASQSVDYNGISYMHWYQQKPGQPPKLLIYAASNPESGVPDRFSGSGSGTDFTLTISSLQAEDVAVYYCQQIIEDPWTFGQGTKVEIKRTVAAPSVFIFPPSDEQLKSGTASVVCLLNNFYPREAKVQWKVDNALQSGNSQESVTEQDSKDSTYSLSSTLTLSKADYEKHKVYACEVTHQGLSSPVTKSFNRGEC

SEQ ID NO: 689 - protein, 454 aa, synthetic construct
  REGION 1..454: note = Description of Artificial Sequence: Synthetic polypeptide
EVQLVESGGGLVQPGGSLRLSCAASGFTFNTYAMNWVRQAPGKGLEWVARIRSKYNNYATYYAASVKGRFTISRDDSKNSLYLQMNSLKTEDTAVYYCVRHGNFGNSYVSWFAYWGQGTLVTVSSASTKGPSVFPLAPSSKSTSGGTAALGCLVKDYFPEPVTVSWNSGALTSGVHTFPAVLQSSGLYSLSSVVTVPSSSLGTQTYICNVNHKPSNTKVDKKVEPKSCDKTHTCPPCPAPEAAGGPSVFLFPPKPKDTLMISRTPEVTCVVVSVSHEDPEVKFNWYVDGVEVHNAKTKPREEQYNSTYRVVSVLTVLHQDWLNGKEYKCKVSNKALPAPIEKTISKAKGQPREPQVYVYPPSREEMTKNQVSLTCLVKGFYPSDIAVEWESNGQPENNYKTTPPVLDSDGSFALVSKLTVDKSRWQQGNVFSCSVMHEALHNHYTQKSLSLSPG

SEQ ID NO: 690 - protein, 215 aa, synthetic construct
  REGION 1..215: note = Description of Artificial Sequence: Synthetic polypeptide
QTVVTQEPSLTVSPGGTVTLTCRSSTGAVTTSNYANWVQQKPGQAPRGLIGGTNKRAPGTPARFSGSLLGGKAALTLSGVQPEDEAEYYCALWYSNLWVFGGGTKLTVLGQPKAAPSVTLFPPSSEELQANKATLVCLISDFYPGAVTVAWKADSSPVKAGVETTTPSKQSNNKYAASSYLSLTPEQWKSHRSYSCQVTHEGSTVEKTVAPTECS

SEQ ID NO: 691 - protein, 338 aa, Homo sapiens
MVVMAPRTLFLLLSGALTLTETWAGSHSMRYFSAAVSRPGRGEPRFIAMGYVDDTQFVRFDSDSACPRMEPRAPWVEQEGPEYWEEETRNTKAHAQTDRMNLQTLRGYYNQSEASSHTLQWMIGCDLGSDGRLLRGYEQYAYDGKDYLALNEDLRSWTAADTAAQISKRKCEAANVAEQRRAYLEGTCVEWLHRYLENGKEMLQRADPPKTHVTHHPVFDYEATLRCWALGFYPAEIILTWQRDGEDQTQDVELVETRPAGDGTFQKWAAVVVPSGEEQRYTCHVQHEGLPEPLMLRWKQSSLPTIPIMGIVAGLVVLAAVVTGAAVAAVLWRKKSSD

SEQ ID NO: 692 - protein, 449 aa, synthetic construct
  REGION 1..449: note = Description of Artificial Sequence: Synthetic polypeptide
QVQLVQSGAEVKKPGASVKVSCKASGNTFTNYYIHWVRQAPGQGLEWMGIINPSGGSTSYAQKLQGRMTMTRDTSTSTVYMELSSLRSEDTAVYFCARQGPFIGDAFDIWGQGTMVTVSSASTKGPSVFPLAPSSKSTSGGTAALGCLVKDYFPEPVTVSWNSGALTSGVHTFPAVLQSSGLYSLSSVVTVPSSSLGTQTYICNVNHKPSNTKVDKKVEPKSCDKTHTCPPCPAPEAAGGPSVFLFPPKPKDTLMISRTPEVTCVVVSVSHEDPEVKFNWYVDGVEVHNAKTKPREEQYNSTYRVVSVLTVLHQDWLNGKEYKCKVSNKALPAPIEKTISKAKGQPREPQVYVLPPSREEMTKNQVSLLCLVKGFYPSDIAVEWESNGQPENNYLTWPPVLDSDGSFFLYSKLTVDKSRWQQGNVFSCSVMHEALHNHYTQKSLSLSPG

SEQ ID NO: 693 - protein, 214 aa, synthetic construct
  REGION 1..214: note = Description of Artificial Sequence: Synthetic polypeptide
DIQMTQSPSSLSASVGDRVTITCRASQGISNYLAWFQQKPGKAPKSLIYAASSLQSGVPSKFSGSGSGTDFTLTISSLQPEDFATYYCQQYNSYPYTFAQGTKLEIKRTVAAPSVFIFPPSDEQLKSGTASVVCLLNNFYPREAKVQWKVDNALQSGNSQESVTEQDSKDSTYSLSSTLTLSKADYEKHKVYACEVTHQGLSSPVTKSFNRGEC

SEQ ID NO: 694 - protein, 476 aa, synthetic construct
  REGION 1..476: note = Description of Artificial Sequence: Synthetic polypeptide
DIQMTQSPSSLSASVGDRVTITCRASQGISNYLAWFQQKPGKAPKSLIYAASSLQSGVPSKFSGSGSGTDFTLTISSLQPEDFATYYCQQYNSYPYTFAQGTKLEIKGGSEGKSSGSGSESKSTGGSQVQLVQSGAEVKKPGASVKVSCKASGNTFTNYYIHWVRQAPGQGLEWMGIINPSGGSTSYAQKLQGRMTMTRDTSTSTVYMELSSLRSEDTAVYFCARQGPFIGDAFDIWGQGTMVTVSSEPKSSDKTHTCPPCPAPEAAGGPSVFLFPPKPKDTLMISRTPEVTCVVVSVSHEDPEVKFNWYVDGVEVHNAKTKPREEQYNSTYRVVSVLTVLHQDWLNGKEYKCKVSNKALPAPIEKTISKAKGQPREPQVYVLPPSREEMTKNQVSLLCLVKGFYPSDIAVEWESNGQPENNYLTWPPVLDSDGSFFLYSKLTVDKSRWQQGNVFSCSVMHEALHNHYTQKSLSLS

SEQ ID NO: 695 - protein, 479 aa, synthetic construct
  REGION 1..479: note = Description of Artificial Sequence: Synthetic polypeptide
DIQMTQSPSSLSASVGDRVTITCRASQGISNYLAWFQQKPGKAPKSLIYAASSLQSGVPSKFSGSGSGTDFTLTISSLQPEDFATYYCQQYNSYPYTFGQGTKLEIKGGSEGKSSGSGSESKSTGGSQVQLVQSGAEVKKPGASVKVSCKASGQTFTNYYIHWVRQAPGQGLEWMGIINPSGGSTSYAQKLQGRMTMTRDTSTSTVYMELSSLRSEDTAVYFCARQGPFIGDAFDIWGQGTTVTVSSEPKSSDKTHTCPPCPAPEAAGGPSVFLFPPKPKDTLMISRTPEVTCVVVSVSHEDPEVKFNWYVDGVEVHNAKTKPREEQYNSTYRVVSVLTVLHQDWLNGKEYKCKVSNKALPAPIEKTISKAKGQPREPQVYVLPPSREEMTKNQVSLLCLVKGFYPSDIAVEWESNGQPENNYLTWPPVLDSDGSFFLYSKLTVDKSRWQQGNVFSCSVMHEALHNHYTQKSLSLSPGK

SEQ ID NO: 696 - protein, 450 aa, synthetic construct
  REGION 1..450: note = Description of Artificial Sequence: Synthetic polypeptide
QVQLQQSGPRLVRPSQTLSLTCAISGDSVFNNNAAWSWIRQSPSRGLEWLGRTYYRSKWLYDYAVSVKSRITVNPDTSRNQFTLQLNSVTPEDTALYYCARGYSSSFDYWGQGTLVTVSSASTKGPSVFPLAPSSKSTSGGTAALGCLVKDYFPEPVTVSWNSGALTSGVHTFPAVLQSSGLYSLSSVVTVPSSSLGTQTYICNVNHKPSNTKVDKKVEPKSCDKTHTCPPCPAPEAAGGPSVFLFPPKPKDTLMISRTPEVTCVVVSVSHEDPEVKFNWYVDGVEVHNAKTKPREEQYNSTYRVVSVLTVLHQDWLNGKEYKCKVSNKALPAPIEKTISKAKGQPREPQVYVYPPSREEMTKNQVSLTCLVKGFYPSDIAVEWESNGQPENNYKTTPPVLDSDGSFALVSKLTVDKSRWQQGNVFSCSVMHEALHNHYTQKSLSLSPGK

SEQ ID NO: 697 - protein, 479 aa, synthetic construct
  REGION 1..479: note = Description of Artificial Sequence: Synthetic polypeptide
DIQMTQSPSSLSASVGDRVTITCRASQGISNYLAWFQQKPGKAPKSLIYAASSLQSGVPSKFSGSGSGTDFTLTISSLQPEDFATYYCQQYNSYPYTFGQGTKLEIKGGSEGKSSGSGSESKSTGGSQVQLVQSGAEVKKPGASVKVSCKASGQTFTNYYIHWVRQAPGQGLEWMGIINPSGGSTSYAQKLQGRMTMTRDTSTSTVYMELSSLRSEDTAVYFCARQGPFIGDAFDIWGQGTTVTVSSEPKSSDKTHTCPPCPAPEAAGGPSVFLFPPKPKDTLMISRTPEVTCVVVSVSHEDPEVKFNWYVDGVEVHNAKTKPREEQYNSTYRVVSVLTVLHQDWLNGKEYKCKVSNKALPAPIEKTISKAKGQPREPQVYTLPPSREEMTKNQVSLWCLVKGFYPSDIAVEWESNGQPENNYKTTPPVLDSDGSFFLYSKLTVDKSRWQQGNVFSCSVMHEALHNHYTQKSLSLSPGK

SEQ ID NO: 698 - skipped

SEQ ID NO: 699 - protein, 5 aa, synthetic construct
  REGION 1..5: note = Description of Artificial Sequence: Synthetic peptide
NYYIH

SEQ ID NO: 700 - protein, 17 aa, synthetic construct
  REGION 1..17: note = Description of Artificial Sequence: Synthetic peptide
IINPSGGSTSYAQKLQG

SEQ ID NO: 701 - protein, 11 aa, synthetic construct
  REGION 1..11: note = Description of Artificial Sequence: Synthetic peptide
QGPFIGDAFDI

SEQ ID NO: 702 - protein, 11 aa, synthetic construct
  REGION 1..11: note = Description of Artificial Sequence: Synthetic peptide
RASQGISNYLA

SEQ ID NO: 703 - protein, 7 aa, synthetic construct
  REGION 1..7: note = Description of Artificial Sequence: Synthetic peptide
AASSLQS

SEQ ID NO: 704 - protein, 9 aa, synthetic construct
  REGION 1..9: note = Description of Artificial Sequence: Synthetic peptide
QQYNSYPYT

SEQ ID NO: 705 - DNA, 1347 bp, synthetic construct
  misc_feature 1..1347: note = Description of Artificial Sequence: Synthetic polynucleotide
  source 1..1347: mol_type = other DNA
caggttcagttggtccagagtggtgccgaagtaaagaagcccggagcatccgtaaaggtgtcctgtaaagccagtggcaatactttcactaactattacatccattgggtccgacaagcccccggacaaggattggagtggatgggtattatcaacccctccggtgggtctacttcttacgctcaaaaactccagggccgaatgacaatgacacgcgacacctcaacttcaaccgtttacatggagcttagcagtcttcgatctgaggacactgctgtttacttttgcgctaggcaggggcctttcataggagacgcttttgacatctgggggcaaggaacaatggtcactgtcagttccgcctccaccaagggcccatcggtcttccccctggcaccctcctccaagagcacctctgggggcacagcggccctgggctgcctggtcaaggactacttccccgaaccggtgacggtgtcgtggaactcaggcgccctgaccagcggcgtgcacaccttcccggctgtcctacagtcctcaggactctactccctcagcagcgtggtgaccgtgccctccagcagcttgggcacccagacctacatctgcaacgtgaatcacaagcccagcaacaccaaggtggacaagaaagttgagcccaaatcttgtgacaaaactcacacatgtccaccgtgcccagcacctgaagcagcagggggaccgtcagtcttcctcttccccccaaaacccaaggacaccctcatgatctcccggacccctgaggtcacatgcgtggtggtgagcgtgagccacgaagaccctgaggtcaagttcaactggtacgtggacggcgtggaggtgcataatgccaagacaaagccgcgggaggagcagtacaacagcacgtaccgtgtggtcagcgtcctcaccgtcctgcaccaggactggctgaatggcaaggagtacaagtgcaaggtctccaacaaagccctcccagcccccatcgagaaaaccatctccaaagccaaagggcagccccgagaaccacaggtgtacgtgctgcccccatcccgggaggagatgaccaagaaccaggtcagcctgctgtgcctggtcaaaggcttctatcccagcgacatcgccgtggagtgggagagcaatgggcagccggagaacaactacctcacctggcctcccgtgctggactccgacggctccttcttcctctacagcaagctcaccgtggacaagtctagatggcagcaggggaacgtcttctcatgctccgtgatgcatgaggctctgcacaaccactacacgcagaagagcctctccctgtctccgggt

SEQ ID NO: 706 - DNA, 642 bp, synthetic construct
  misc_feature 1..642: note = Description of Artificial Sequence: Synthetic polynucleotide
  source 1..642: mol_type = other DNA
gacatccagatgacccagagccctagctctttaagcgctagcgtgggcgatcgtgtgaccatcacttgtcgtgccagccaaggtatcagcaactatttagcttggttccagcagaagcccggcaaggctcccaagtctttaatctatgccgctagctctttacagagcggagtgcccagcaagtttagcggcagcggtagcggaaccgacttcactttaaccatcagctctctgcagcccgaggacttcgccacctactactgccagcagtacaacagctacccctacaccttcgcccaaggtaccaagctggagatcaagcgtacggtggctgcaccatctgtcttcatcttcccgccatctgatgagcagttgaaatctggaactgcctctgttgtgtgcctgctgaataacttctatcccagagaggccaaagtacagtggaaggtggataacgccctccaatcgggtaactcccaggagagtgtcacagagcaggacagcaaggacagcacctacagcctcagcagcaccctgacgctgagcaaagcagactacgagaaacacaaagtctacgcctgcgaagtcacccatcagggcctgagctcgcccgtcacaaagagcttcaacaggggagagtgt

SEQ ID NO: 707 - DNA, 1434 bp, synthetic construct
  misc_feature 1..1434: note = Description of Artificial Sequence: Synthetic polynucleotide
  source 1..1434: mol_type = other DNA
gatattcagatgacacagtctccatccagcttgtcagcaagcgtgggtgatagggttaccatcacttgtcgcgcaagtcaaggaattagtaactatttggcatggtttcagcagaaacccggtaaggctccaaaatcactcatatatgcagcatcctccctccagtctggtgttccaagtaagttttccgggagcggttccggcaccgatttcactctcacaatctctagccttcaacccgaggacttcgctacctattattgccaacagtataatagctacccatacacttttgctcaagggaccaaactcgagatcaaaggcggctccgagggcaagagcagcggcagcggcagcgagagcaagagcaccggcggcagccaggttcagttggtccagagtggtgccgaagtaaagaagcccggagcatccgtaaaggtgtcctgtaaagccagtggcaatactttcactaactattacatccattgggtccgacaagcccccggacaaggattggagtggatgggtattatcaacccctccggtgggtctacttcttacgctcaaaaactccagggccgaatgacaatgacacgcgacacctcaacttcaaccgtttacatggagcttagcagtcttcgatctgaggacactgctgtttacttttgcgctaggcaggggcctttcataggagacgcttttgacatctgggggcaaggaacaatggtcactgtcagttccgagcccaaatctagcgacaaaactcacacatgtccaccgtgcccagcacctgaagcagcagggggaccgtcagtcttcctcttccccccaaaacccaaggacaccctcatgatctcccggacccctgaggtcacatgcgtggtggtgagcgtgagccacgaagaccctgaggtcaagttcaactggtacgtggacggcgtggaggtgcataatgccaagacaaagccgcgggaggagcagtacaacagcacgtaccgtgtggtcagcgtcctcaccgtcctgcaccaggactggctgaatggcaaggagtacaagtgcaaggtctccaacaaagccctcccagcccccatcgagaaaaccatctccaaagccaaagggcagccccgagaaccacaggtgtacgtgctgcccccatcccgggaggagatgaccaagaaccaggtcagcctgctgtgcctggtcaaaggcttctatcccagcgacatcgccgtggagtgggagagcaatgggcagccggagaacaactacctcacctggcctcccgtgctggactccgacggctccttcttcctctacagcaagctcaccgtggacaagtctagatggcagcaggggaacgtcttctcatgctccgtgatgcatgaggctctgcacaaccactacacgcagaagagcctctccctgtctccgggt

SEQ ID NO: 708 - DNA, 1437 bp, synthetic construct
  misc_feature 1..1437: note = Description of Artificial Sequence: Synthetic polynucleotide
  source 1..1437: mol_type = other DNA
gacatccagatgacccagtctccatcctctctgtccgcctctgtgggcgacagagtgaccatcacctgtagagcctctcagggcatctccaactacctggcctggttccagcagaagcctggcaaggctcccaagagcctgatctacgctgcttccagtctgcagtctggcgtgccctctaagttctccggctctggctctggcaccgactttaccctgacaatctccagcctgcagcctgaggacttcgccacctactactgccagcagtacaacagctacccctacacctttggccagggcaccaagctggaaatcaagggcggctccgagggcaagagcagcggcagcggcagcgagagcaagagcaccggcggcagccaggttcagctggttcagtctggcgccgaagtgaagaaacctggcgcctctgtgaaggtgtcctgcaaggcttctggacagaccttcaccaactactacatccactgggtccgacaggcccctggacaaggattggagtggatgggcatcatcaacccttccggcggctctacctcttacgcccagaaactgcagggcagaatgaccatgaccagagacacctccaccagcaccgtgtacatggaactgtccagcctgagatccgaggataccgccgtgtacttctgtgccagacagggaccttttatcggcgacgccttcgacatctggggccagggaacaacagtgaccgtgtcctctgagcccaaatctagcgacaaaactcacacttgtccaccgtgcccagcacctgaagcagcagggggaccgtcagtcttcctcttccccccaaaacccaaggacaccctcatgatctcccggacccctgaggtcacatgcgtggtggtgagcgtgagccacgaagaccctgaggtcaagttcaactggtacgtggacggcgtggaggtgcataatgccaagacaaagccgcgggaggagcagtacaacagcacgtaccgtgtggtcagcgtcctcaccgtcctgcaccaggactggctgaatggcaaggagtacaagtgcaaggtgtccaacaaagccctcccagcccccatcgagaaaaccatctccaaagccaaagggcagccccgagaaccacaggtgtacgtgctgcccccatcccgggaggagatgaccaagaaccaggtcagcctgctgtgcctggtcaaaggcttctatcccagcgacatcgccgtggagtgggagagcaatgggcagccggagaacaactacctcacctggcctcccgtgctggactccgacggctccttcttcctctacagcaagctcaccgtggacaagtccagatggcagcaggggaacgtcttctcatgctccgtgatgcatgaggctctgcacaaccactacacgcagaagtctctctccctgtctccgggaaaa

SEQ ID NO: 709 - DNA, 1437 bp, synthetic construct
  misc_feature 1..1437: note = Description of Artificial Sequence: Synthetic polynucleotide
  source 1..1437: mol_type = other DNA
gacatccagatgacccagtctccatcctctctgtccgcctctgtgggcgacagagtgaccatcacctgtagagcctctcagggcatctccaactacctggcctggttccagcagaagcctggcaaggctcccaagagcctgatctacgctgcttccagtctgcagtctggcgtgccctctaagttctccggctctggctctggcaccgactttaccctgacaatctccagcctgcagcctgaggacttcgccacctactactgccagcagtacaacagctacccctacacctttggccagggcaccaagctggaaatcaagggcggctccgagggcaagagcagcggcagcggcagcgagagcaagagcaccggcggcagccaggttcagctggttcagtctggcgccgaagtgaagaaacctggcgcctctgtgaaggtgtcctgcaaggcttctggacagaccttcaccaactactacatccactgggtccgacaggcccctggacaaggattggagtggatgggcatcatcaacccttccggcggctctacctcttacgcccagaaactgcagggcagaatgaccatgaccagagacacctccaccagcaccgtgtacatggaactgtccagcctgagatccgaggataccgccgtgtacttctgtgccagacagggaccttttatcggcgacgccttcgacatctggggccagggaacaacagtgaccgtgtcctctgagcccaaatctagcgacaaaactcacacatgtccaccgtgcccagcacctgaagcagcagggggaccgtcagtcttcctcttccccccaaaacccaaggacaccctcatgatctcccggacccctgaggtcacatgcgtggtggtgagcgtgagccacgaagaccctgaggtcaagttcaactggtacgtggacggcgtggaggtgcataatgccaagacaaagccgcgggaggagcagtacaacagcacgtaccgtgtggtcagcgtcctcaccgtcctgcaccaggactggctgaatggcaaggagtacaagtgcaaggtctccaacaaagccctcccagcccccatcgagaaaaccatctccaaagccaaagggcagccccgagaaccacaggtgtacaccctgcccccatcccgggaggagatgaccaagaaccaggtcagcctgtggtgcctggtcaaaggcttctatcccagcgacatcgccgtggagtgggagagcaatgggcagccggagaacaactacaagaccacgcctcccgtgctggactccgacggctccttcttcctctacagcaagctcaccgtggacaagtctagatggcagcaggggaacgtcttctcatgctccgtgatgcatgaggctctgcacaaccactacacgcagaagagcctctccctgtctccgggtaaa

SEQ ID NO: 710 - DNA, 1422 bp, synthetic construct; identical to SEQ ID NO: 353
  misc_feature 1..1422: note = Description of Artificial Sequence: Synthetic polynucleotide
  source 1..1422: mol_type = other DNA

SEQ ID NO: 711 - DNA, 1422 bp, synthetic construct
  misc_feature 1..1422: note = Description of Artificial Sequence: Synthetic polynucleotide
  source 1..1422: mol_type = other DNA
gaggtgcaactggtggagtctgggggaggcctggtcaagcctggggggtccctgagactctcctgtgcagcctctggattcaccttcagtagatataacatgaactgggtccgccaggctccagggaaggggctggagtgggtctcatccattagtactagtagtaattacatatactacgcagactcagtgaagggccgattcaccttctccagagacaacgccaagaactcactggatctgcaaatgagcggcctgagagccgaggacacggctatttattactgtacgagaggctgggggccttttgactactggggccagggaaccctggtcaccgtctcctcaggcggctccgagggcaagagcagcggcagcggcagcgagagcaagagcaccggcggcagcgacatacaaatgacacaatcaccctcttctctttctgcaagcgttggcgaccgtgtcactatcacttgtcgagcccgccagtccataggtactgccattcactggtatcaacagaagcctggcaaggctcccaaactcctgattaagtatgccagcgagagcatttccggcgtaccttcaagattttccggctccggtagtgggacagatttcactctcactatatctagcctccaaccagaagatttcgccacttactactgtcaacaatcaggttcatggccttacactttcggccaggggacaaaattggagatcaaggagcccaaatctagcgacaaaactcacacatgtccaccgtgcccagcacctgaagcagcagggggaccgtcagtcttcctcttccccccaaaacccaaggacaccctcatgatctcccggacccctgaggtcacatgcgtggtggtgagcgtgagccacgaagaccctgaggtcaagttcaactggtacgtggacggcgtggaggtgcataatgccaagacaaagccgcgggaggagcagtacaacagcacgtaccgtgtggtcagcgtcctcaccgtcctgcaccaggactggctgaatggcaaggagtacaagtgcaaggtctccaacaaagccctcccagcccccatcgagaaaaccatctccaaagccaaagggcagccccgagaaccacaggtgtacgtgtaccccccatcccgggaggagatgaccaagaaccaggtcagcctgacctgcctggtcaaaggcttctatcccagcgacatcgccgtggagtgggagagcaatgggcagccggagaacaactacaagaccacgcctcccgtgctggactccgacggctccttcgccctcgtgagcaagctcaccgtggacaagtctagatggcagcaggggaacgtcttctcatgctccgtgatgcatgaggctctgcacaaccactacacgcagaagagcctctccctgtctccgggt

SEQ ID NO: 712 - DNA, 1335 bp, synthetic construct
  misc_feature 1..1335: note = Description of Artificial Sequence: Synthetic polynucleotide
  source 1..1335: mol_type = other DNA
gaggtgcaactggtggagtctgggggaggcctggtcaagcctggggggtccctgagactctcctgtgcagcctctggattcaccttcagtagatataacatgaactgggtccgccaggctccagggaaggggctggagtgggtctcatccattagtactagtagtaattacatatactacgcagactcagtgaagggccgattcaccttctccagagacaacgccaagaactcactggatctgcaaatgagcggcctgagagccgaggacacggctatttattactgtacgagaggctgggggccttttgactactggggccagggaaccctggtcaccgtctcctcagcctccaccaagggcccatcggtcttccccctggcaccctcctccaagagcacctctgggggcacagcggccctgggctgcctggtcaaggactacttccccgaaccggtgacggtgtcgtggaactcaggcgccctgaccagcggcgtgcacaccttcccggctgtcctacagtcctcaggactctactccctcagcagcgtggtgaccgtgccctccagcagcttgggcacccagacctacatctgcaacgtgaatcacaagcccagcaacaccaaggtggacaagaaagttgagcccaaatcttgtgacaaaactcacacatgtccaccgtgcccagcacctgaagcagcagggggaccgtcagtcttcctcttccccccaaaacccaaggacaccctcatgatctcccggacccctgaggtcacatgcgtggtggtgagcgtgagccacgaagaccctgaggtcaagttcaactggtacgtggacggcgtggaggtgcataatgccaagacaaagccgcgggaggagcagtacaacagcacgtaccgtgtggtcagcgtcctcaccgtcctgcaccaggactggctgaatggcaaggagtacaagtgcaaggtctccaacaaagccctcccagcccccatcgagaaaaccatctccaaagccaaagggcagccccgagaaccacaggtgtacgtgtaccccccatcccgggaggagatgaccaagaaccaggtcagcctgacctgcctggtcaaaggcttctatcccagcgacatcgccgtggagtgggagagcaatgggcagccggagaacaactacaagaccacgcctcccgtgctggactccgacggctccttcgccctcgtgagcaagctcaccgtggacaagtctagatggcagcaggggaacgtcttctcatgctccgtgatgcatgaggctctgcacaaccactacacgcagaagagcctctccctgtctccgggt

SEQ ID NO: 713 - DNA, 642 bp, synthetic construct
  misc_feature 1..642: note = Description of Artificial Sequence: Synthetic polynucleotide
  source 1..642: mol_type = other DNA
gacatacaaatgacacaatcaccctcttctctttctgcaagcgttggcgaccgtgtcactatcacttgtcgagcccgccagtccataggtactgccattcactggtatcaacagaagcctggcaaggctcccaaactcctgattaagtatgccagcgagagcatttccggcgtaccttcaagattttccggctccggtagtgggacagatttcactctcactatatctagcctccaaccagaagatttcgccacttactactgtcaacaatcaggttcatggccttacactttcggccaggggacaaaattggagatcaagcggacagtggccgctccttccgtgttcatcttcccaccttccgacgagcagctgaagtccggcacagcttctgtcgtgtgcctgctgaacaacttctaccctcgggaagccaaggtgcagtggaaggtggacaatgccctgcagtccggcaactcccaagagtctgtgaccgagcaggactccaaggacagcacctacagcctgtcctccacactgaccctgtccaaggccgactacgagaagcacaaggtgtacgcctgcgaagtgacccatcagggcctgtctagccctgtgaccaagtctttcaaccggggcgagtgt

SEQ ID NO: 714 - DNA, 1350 bp, synthetic construct
  misc_feature 1..1350: note = Description of Artificial Sequence: Synthetic polynucleotide
  source 1..1350: mol_type = other DNA
caggtgcagctgcagcagtctggccctagactcgtgcggccttcccagaccctgtctctgacctgtgccatctccggcgactccgtgttcaacaacaacgccgcctggtcctggatccggcagtctccatctcgcggtctggagtggctcggtcgcacctactaccgctctaaatggctgtacgactacgccgtgtccgtgaagtcccggatcaccgtgaaccctgacacctcccggaaccagttcaccctgcagctgaactccgtgacccctgaggacaccgccctgtactactgcgccagaggctactcctcctccttcgactattggggccaaggcaccctcgtgaccgtgtcctctgcctccaccaagggcccatcggtcttccccctggcaccctcctccaagagcacctctgggggcacagcggccctgggctgcctggtcaaggactacttccccgaaccggtgacggtgtcgtggaactcaggcgccctgaccagcggcgtgcacaccttcccggctgtcctacagtcctcaggactctactccctcagcagcgtggtgaccgtgccctccagcagcttgggcacccagacctacatctgcaacgtgaatcacaagcccagcaacaccaaggtggacaagaaagttgagcccaaatcttgtgacaaaactcacacatgcccaccgtgcccagcacctgaagccgccgggggaccgtcagtcttcctcttccccccaaaacccaaggacaccctcatgatctcccggacccctgaggtcacatgcgtggtggtgagcgtgagccacgaagaccctgaggtcaagttcaactggtacgtggacggcgtggaggtgcataatgccaagacaaagccgcgggaggagcagtacaacagcacgtaccgtgtggtcagcgtcctcaccgtcctgcaccaggactggctgaatggcaaggagtacaagtgcaaggtgtcgaacaaagccctcccagcccccatcgagaaaaccatctccaaagccaaagggcagccccgagaaccacaggtgtacaccctgcccccatcccgggaggagatgaccaagaaccaggtcagcctgtcctgcgccgtcaaaggcttctatcccagcgacatcgccgtggagtgggagagcaatgggcagccggagaacaactacaagaccacgcctcccgtgctggactccgacggctccttcttcctcgtgagcaagctcaccgtggacaagagcagatggcagcaggggaacgtcttctcatgctccgtgatgcatgaggctctgcacaaccggttcacgcagaagtctctctccctgtctccgggaaaa

SEQ ID NO: 715 - DNA, 648 bp, synthetic construct; identical to SEQ ID NO: 352
  misc_feature 1..648: note = Description of Artificial Sequence: Synthetic polynucleotide
  source 1..648: mol_type = other DNA

SEQ ID NO: 716 - protein, 618 aa, Homo sapiens
MVSPRMSGLLSQTVILALIFLPQTRPAGVFELQIHSFGPGPGPGAPRSPCSARLPCRLFFRVCLKPGLSEEAAESPCALGAALSARGPVYTEQPGAPAPDLPLPDGLLQVPFRDAWPGTFSFIIETWREELGDQIGGPAWSLLARVAGRRRLAAGGPWARDIQRAGAWELRFSYRARCEPPAVGTACTRLCRPRSAPSRCGPGLRPCAPLEDECEAPLVCRAGCSPEHGFCEQPGECRCLEGWTGPLCTVPVSTSSCLSPRGPSSATTGCLVPGPGPCDGNPCANGGSCSETPRSFECTCPRGFYGLRCEVSGVTCADGPCFNGGLCVGGADPDSAYICHCPPGFQGSNCEKRVDRCSLQPCRNGGLCLDLGHALRCRCRAGFAGPRCEHDLDDCAGRACANGGTCVEGGGAHRCSCALGFGGRDCRERADPCAARPCAHGGRCYAHFSGLVCACAPGYMGARCEFPVHPDGASALPAAPPGLRPGDPQRYLLPPALGLLVAAGVAGAALLLVHVRRRGHSQDAGSRLLAGTPEPSVHALPDALNNLRTQEGSGDGPSSSVDWNRPEDVDPQGIYVISAPSIYAREVATPLFPPLHTGRAGQRQHLLFPYPSSILSVK

SEQ ID NO: 717 - protein, 475 aa, synthetic construct
  REGION 1..475: note = Description of Artificial Sequence: Synthetic polypeptide
EVQLVESGGGLVKPGGSLRLSCAASGFTFSRYNMNWVRQAPGKGLEWVSSISTSSNYIYYADSVKGRFTFSRDNAKNSLDLQMSGLRAEDTAIYYCTRGWGPFDYWGQGTLVTVSSGGSEGKSSGSGSESKSTGGSDIQMTQSPSSLSASVGDRVTITCRARQSIGTAIHWYQQKPGKAPKLLIKYASESISGVPSRFSGSGSGTDFTLTISSLQPEDFATYYCQQSGSWPYTFGQGTKLEIKEPKSSDKTHTCPPCPAPEAAGGPSVFLFPPKPKDTLMISRTPEVTCVVVSVSHEDPEVKFNWYVDGVEVHNAKTKPREEQYNSTYRVVSVLTVLHQDWLNGKEYKCKVSNKALPAPIEKTISKAKGQPREPQVYVYPPSREEMTKNQVSLTCLVKGFYPSDIAVEWESNGQPENNYKTTPPVLDSDGSFALVSKLTVDKSRWQQGNVFSCSVMHEALHNHYTQKSLSLSPGK

SEQ ID NO: 718 - protein, 475 aa, synthetic construct; identical to SEQ ID NO: 331
  REGION 1..475: note = Description of Artificial Sequence: Synthetic polypeptide

SEQ ID NO: 719 - protein, 446 aa, synthetic construct
  REGION 1..446: note = Description of Artificial Sequence: Synthetic polypeptide
EVQLVESGGGLVKPGGSLRLSCAASGFTFSRYNMNWVRQAPGKGLEWVSSISTSSNYIYYADSVKGRFTFSRDNAKNSLDLQMSGLRAEDTAIYYCTRGWGPFDYWGQGTLVTVSSASTKGPSVFPLAPSSKSTSGGTAALGCLVKDYFPEPVTVSWNSGALTSGVHTFPAVLQSSGLYSLSSVVTVPSSSLGTQTYICNVNHKPSNTKVDKKVEPKSCDKTHTCPPCPAPEAAGGPSVFLFPPKPKDTLMISRTPEVTCVVVSVSHEDPEVKFNWYVDGVEVHNAKTKPREEQYNSTYRVVSVLTVLHQDWLNGKEYKCKVSNKALPAPIEKTISKAKGQPREPQVYVYPPSREEMTKNQVSLTCLVKGFYPSDIAVEWESNGQPENNYKTTPPVLDSDGSFALVSKLTVDKSRWQQGNVFSCSVMHEALHNHYTQKSLSLSPGK

SEQ ID NO: 720 - protein, 11 aa, synthetic construct
  REGION 1..11: note = Description of Artificial Sequence: Synthetic peptide
GGDNIGSKSVH

SEQ ID NO: 721 - protein, 7 aa, synthetic construct
  REGION 1..7: note = Description of Artificial Sequence: Synthetic peptide
DNSDRPS

SEQ ID NO: 722 - DNA, 642 bp, synthetic construct
  misc_feature 1..642: note = Description of Artificial Sequence: Synthetic polynucleotide
  source 1..642: mol_type = other DNA
gatattcaaatgacccagtcaccatcattcctgtccgcctcagtgggagatcgcgtcactattacttgtcgtgctagccaggggatatcatcatatttggcttggtatcaacaaaagccaggaaaggccccaaaattccttatatatgcagctagtacactccagagtggtgttcctagccggttctctggcagcggctcagggaccgagttcaccctgacaatctccagcttgcagcccgaagactttgcaacctactattgccagcaactgaactcctatcctctgactttcgggggaggaaccaaggttgagattaaacggacagtggccgctccttccgtgttcatcttcccaccttccgacgagcagctgaagtccggcacagcttctgtcgtgtgcctgctgaacaacttctaccctcgggaagccaaggtgcagtggaaggtggacaatgccctgcagtccggcaactcccaagagtctgtgaccgagcaggactccaaggacagcacctacagcctgtcctccacactgaccctgtccaaggccgactacgagaagcacaaggtgtacgcctgcgaagtgacccatcagggcctgtctagccctgtgaccaagtctttcaaccggggcgagtgt

SEQ ID NO: 723 - DNA, 642 bp, synthetic construct
  misc_feature 1..642: note = Description of Artificial Sequence: Synthetic polynucleotide
  source 1..642: mol_type = other DNA
gatattgtaatgactcagtcaccctcttcactgagtgcatcagtaggtgatcgcgttaccatcacttgccgtgccagtcaagacatttcaaattaccttgcatggtaccaacaaaagcccggaaaagtgccaaagtttttgatttatgccgcttcaacactccattcaggagtgccctctcgtttcagtggatctggcagtggcaccgattttactctcacaataagcagtctccagcctgaggatgtagccacctattattgccaaaaatataattcagccccctatacttttggacagggcacacgccttgagattaaacggacagtggccgctccttccgtgttcatcttcccaccttccgacgagcagctgaagtccggcacagcttctgtcgtgtgcctgctgaacaacttctaccctcgggaagccaaggtgcagtggaaggtggacaatgccctgcagtccggcaactcccaagagtctgtgaccgagcaggactccaaggacagcacctacagcctgtcctccacactgaccctgtccaaggccgactacgagaagcacaaggtgtacgcctgcgaagtgacccatcagggcctgtctagccctgtgaccaagtctttcaaccggggcgagtgt

SEQ ID NO: 724 - DNA, 363 bp, synthetic construct; identical to SEQ ID NO: 362
  misc_feature 1..363: note = Description of Artificial Sequence: Synthetic polynucleotide
  source 1..363: mol_type = other DNA

SEQ ID NO: 725 - DNA, 1335 bp, synthetic construct; identical to SEQ ID NO: 712
  misc_feature 1..1335: note = Description of Artificial Sequence: Synthetic polynucleotide
  source 1..1335: mol_type = other DNA

SEQ ID NO: 726 - DNA, 642 bp, synthetic construct; identical to SEQ ID NO: 713
  misc_feature 1..642: note = Description of Artificial Sequence: Synthetic polynucleotide
  source 1..642: mol_type = other DNA

SEQ ID NO: 727 - protein, 450 aa, synthetic construct
  REGION 1..450: note = Description of Artificial Sequence: Synthetic polypeptide
QVQLQQSGPRLVRPSQTLSLTCAISGDSVFNNNAAWSWIRQSPSRGLEWLGRTYYRSKWLYDYAVSVKSRITVNPDTSRNQFTLQLNSVTPEDTALYYCARGYSSSFDYWGQGTLVTVSSASTKGPSVFPLAPSSKSTSGGTAALGCLVKDYFPEPVTVSWNSGALTSGVHTFPAVLQSSGLYSLSSVVTVPSSSLGTQTYICNVNHKPSNTKVDKKVEPKSCDKTHTCPPCPAPEAAGGPSVFLFPPKPKDTLMISRTPEVTCVVVSVSHEDPEVKFNWYVDGVEVHNAKTKPREEQYNSTYRVVSVLTVLHQDWLNGKEYKCKVSNKALPAPIEKTISKAKGQPREPQVYTLPPSREEMTKNQVSLSCAVKGFYPSDIAVEWESNGQPENNYKTTPPVLDSDGSFFLVSKLTVDKSRWQQGNVFSCSVMHEALHNRFTQKSLSLSPGK

SEQ ID NO: 728 - protein, 8 aa, synthetic construct
  REGION 1..8: note = Description of Artificial Sequence: Synthetic peptide
YYSTPRMY

SEQ ID NO: 729 - protein, 6 aa, synthetic construct
  REGION 1..6: note = Description of Artificial Sequence: Synthetic peptide
GFTFSH

SEQ ID NO: 730 - protein, 17 aa, synthetic construct
  REGION 1..17: note = Description of Artificial Sequence: Synthetic peptide
TAVYYCAKPHIVMVTAL

SEQ ID NO: 731 - protein, 13 aa, synthetic construct
  REGION 1..13: note = Description of Artificial Sequence: Synthetic peptide
YDDSDRPSGIPER

SEQ ID NO: 732 - protein, 5 aa, synthetic construct
  REGION 1..5: note = Description of Artificial Sequence: Synthetic peptide
FTFSY

SEQ ID NO: 733 - protein, 8 aa, synthetic construct
  REGION 1..8: note = Description of Artificial Sequence: Synthetic peptide
GSYWAFDY

SEQ ID NO: 734 - protein, 4 aa, synthetic construct
  REGION 1..4: note = Description of Artificial Sequence: Synthetic peptide
DNSD

SEQ ID NO: 735 - protein, 9 aa, synthetic construct
  REGION 1..9: note = Description of Artificial Sequence: Synthetic peptide
GNSITSDYA

SEQ ID NO: 736 - protein, 4 aa, synthetic construct
  REGION 1..4: note = Description of Artificial Sequence: Synthetic peptide
GFTF

SEQ ID NO: 737 - protein, 9 aa, synthetic construct
  REGION 1..9: note = Description of Artificial Sequence: Synthetic peptide
ARDQNYDIL

SEQ ID NO: 738 - protein, 5 aa, synthetic construct
  REGION 1..5: note = Description of Artificial Sequence: Synthetic peptide
VTPNF

SEQ ID NO: 739 - protein, 9 aa, synthetic construct
  REGION 1..9: note = Description of Artificial Sequence: Synthetic peptide
YAASTLQSG

SEQ ID NO: 740 - protein, 7 aa, synthetic construct
  REGION 1..7: note = Description of Artificial Sequence: Synthetic peptide
ESGWSHY

SEQ ID NO: 741 - protein, 244 aa, synthetic construct
  REGION 1..244: note = Description of Artificial Sequence: Synthetic polypeptide
VPLIEGRIVGGWECEKHSQPWQVAVYSHGWAHCGGVLVHPQWVLTAAHCLKKNSQVWLGRHNLFEPEDTGQRVPVSHSFPHPLYNMSLLKHQSLRPDEDSSHDLMLLRLSEPAKITDVVKVLGLPTQEPALGTTCYASGWGSIEPEEFLRPRSLQCVSLHLLSNDMCARAYSEKVTEFMLCAGLWTGGKDTCGGDSGGPLVCNGVLQGITSWGPEPCALPEKPAVYTKVVHYRKWIKDTIAANP

SEQ ID NO: 742 - protein, 451 aa, synthetic construct
  REGION 1..451: note = Description of Artificial Sequence: Synthetic polypeptide
EVQLVESGGGLVQPGGSLRLSCAASGFTFSSYWMTWVRQPPGKGLEWVANIKQDGSERYFVDSVKGRFTISRDNAKNSLYLQMNSLRAEDTAVYYCARDQNYDILTGHYGMDVWGQGTTVTVSSASTKGPSVFPLAPCSRSTSESTAALGCLVKDYFPEPVTVSWNSGALTSGVHTFPAVLQSSGLYSLSSVVTVPSSSLGTKTYTCNVDHKPSNTKVDKRVESKYGPPCPPCPAPEAAGGPSVFLFPPKPKDTLMISRTPEVTCVVVDVSQEDPEVQFNWYVDGVEVHNAKTKPREEQFNSTYRVVSVLTVLHQDWLNGKEYKCKVSNKGLPSSIEKTISKAKGQPREPQVYTLPPSQEEMTKNQVSLTCLVKGFYPSDIAVEWESNGQPENNYKTTPPVLDSDGSFFLYSRLTVDKSRWQEGNVFSCSVMHEALHNHYTQKSLSLSLGK

SEQ ID NO: 743 - protein, 214 aa, synthetic construct
  REGION 1..214: note = Description of Artificial Sequence: Synthetic polypeptide
EIVLTQSPSFLSASVGDRVTITCRASQGISSYLSWYQQKPGKAPKLLIYATSTLQSGVPSRFSGSGSGTEFTLTISSLQPEDFATYYCQQLNSYPRTFGQGTKVEIKRTVAAPSVFIFPPSDEQLKSGTASVVCLLNNFYPREAKVQWKVDNALQSGNSQESVTEQDSKDSTYSLSSTLTLSKADYEKHKVYACEVTHQGLSSPVTKSFNRGEC

SEQ ID NO: 744 - protein, 92 aa, synthetic construct
  REGION 1..92: note = Description of Artificial Sequence: Synthetic polypeptide
DPPKTHVTHHPVFDYEATLRCWALGFYPAEIILTWQRDGEDQTQDVELVETRPAGDGTFQKWAAVVVPSGEEQRYTCHVQHEGLPEPLMLRW

SEQ ID NO: 745 - protein, 244 aa, synthetic construct; identical to SEQ ID NO: 741
  REGION 1..244: note = Description of Artificial Sequence: Synthetic polypeptide

SEQ ID NO: 746 - protein, 92 aa, synthetic construct; identical to SEQ ID NO: 744
  REGION 1..92: note = Description of Artificial Sequence: Synthetic polypeptide

SEQ ID NO: 747 - protein, 474 aa, synthetic construct
  REGION 1..474: note = Description of Artificial Sequence: Synthetic polypeptide
EVQLVESGGGLVKPGGSLRLSCAASGFTFSRYNMNWVRQAPGKGLEWVSSISTSSNYIYYADSVKGRFTFSRDNAKNSLDLQMSGLRAEDTAIYYCTRGWGPFDYWGQGTLVTVSSGGSEGKSSGSGSESKSTGGSDIQMTQSPSSLSASVGDRVTITCRARQSIGTAIHWYQQKPGKAPKLLIYYASESISGVPSRFSGSGSGTDFTLTISSVQPEDFATYYCQQSGSWPYTFGQGTKLEIKEPKSSDKTHTCPPCPAPEAAGGPSVFLFPPKPKDTLMISRTPEVTCVVVSVSHEDPEVKFNWYVDGVEVHNAKTKPREEQYNSTYRVVSVLTVLHQDWLNGKEYKCKVSNKALPAPIEKTISKAKGQPREPQVYVYPPSREEMTKNQVSLTCLVKGFYPSDIAVEWESNGQPENNYKTTPPVLDSDGSFALVSKLTVDKSRWQQGNVFSCSVMHEALHNHYTQKSLSLSPG

SEQ ID NO: 748 - protein, 474 aa, synthetic construct
  REGION 1..474: note = Description of Artificial Sequence: Synthetic polypeptide
DIQMTQSPSSLSASVGDRVTITCRARQSIGTAIHWYQQKPGKAPKLLIYYASESISGVPSRFSGSGSGTDFTLTISSVQPEDFATYYCQQSGSWPYTFGQGTKLEIKGGSEGKSSGSGSESKSTGGSEVQLVESGGGLVKPGGSLRLSCAASGFTFSRYNMNWVRQAPGKGLEWVSSISTSSNYIYYADSVKGRFTFSRDNAKNSLDLQMSGLRAEDTAIYYCTRGWGPFDYWGQGTLVTVSSEPKSSDKTHTCPPCPAPEAAGGPSVFLFPPKPKDTLMISRTPEVTCVVVSVSHEDPEVKFNWYVDGVEVHNAKTKPREEQYNSTYRVVSVLTVLHQDWLNGKEYKCKVSNKALPAPIEKTISKAKGQPREPQVYVYPPSREEMTKNQVSLTCLVKGFYPSDIAVEWESNGQPENNYKTTPPVLDSDGSFALVSKLTVDKSRWQQGNVFSCSVMHEALHNHYTQKSLSLSPG

SEQ ID NO: 749 - protein, 474 aa, synthetic construct
  REGION 1..474: note = Description of Artificial Sequence: Synthetic polypeptide
EVQLVESGGGLVKPGGSLRLSCAASGFTFSRYNMNWVRQAPGKGLEWVSSISTSSNYIYYADSVKGRFTFSRDNAKNSLDLQMSGLRAEDTAIYYCTRGWGPFDYWGQGTLVTVSSGGSEGKSSGSGSESKSTGGSDIQMTQSPSSLSASVGDRVTITCRARQSIGTAIHWYQQKPGKAPKLLIKYASESISGVPSRFSGSGSGTDFTLTISSVQPEDFATYYCQQSGSWPYTFGQGTKLEIKEPKSSDKTHTCPPCPAPEAAGGPSVFLFPPKPKDTLMISRTPEVTCVVVSVSHEDPEVKFNWYVDGVEVHNAKTKPREEQYNSTYRVVSVLTVLHQDWLNGKEYKCKVSNKALPAPIEKTISKAKGQPREPQVYVYPPSREEMTKNQVSLTCLVKGFYPSDIAVEWESNGQPENNYKTTPPVLDSDGSFALVSKLTVDKSRWQQGNVFSCSVMHEALHNHYTQKSLSLSPG

SEQ ID NO: 750 - protein, 474 aa, synthetic construct
  REGION 1..474: note = Description of Artificial Sequence: Synthetic polypeptide
DIQMTQSPSSLSASVGDRVTITCRARQSIGTAIHWYQQKPGKAPKLLIKYASESISGVPSRFSGSGSGTDFTLTISSVQPEDFATYYCQQSGSWPYTFGQGTKLEIKGGSEGKSSGSGSESKSTGGSEVQLVESGGGLVKPGGSLRLSCAASGFTFSRYNMNWVRQAPGKGLEWVSSISTSSNYIYYADSVKGRFTFSRDNAKNSLDLQMSGLRAEDTAIYYCTRGWGPFDYWGQGTLVTVSSEPKSSDKTHTCPPCPAPEAAGGPSVFLFPPKPKDTLMISRTPEVTCVVVSVSHEDPEVKFNWYVDGVEVHNAKTKPREEQYNSTYRVVSVLTVLHQDWLNGKEYKCKVSNKALPAPIEKTISKAKGQPREPQVYVYPPSREEMTKNQVSLTCLVKGFYPSDIAVEWESNGQPENNYKTTPPVLDSDGSFALVSKLTVDKSRWQQGNVFSCSVMHEALHNHYTQKSLSLSPG

SEQ ID NO: 751 - protein, 474 aa, synthetic construct
  REGION 1..474: note = Description of Artificial Sequence: Synthetic polypeptide
EVQLVESGGGLVKPGGSLRLSCAASGFTFSRYNMNWVRQAPGKGLEWVSSISTSSNYIYYADSVKGRFTFSRDNAKNSLDLQMSGLRAEDTAIYYCTRGWGPFDYWGQGTLVTVSSGGSEGKSSGSGSESKSTGGSDIQMTQSPSSLSASVGDRVTITCRARQSIGTAIHWYQQKPGKAPKLLIYYASESISGVPSRFSGSGSGTDFTLTISSLQPEDFATYYCQQSGSWPYTFGQGTKLEIKEPKSSDKTHTCPPCPAPEAAGGPSVFLFPPKPKDTLMISRTPEVTCVVVSVSHEDPEVKFNWYVDGVEVHNAKTKPREEQYNSTYRVVSVLTVLHQDWLNGKEYKCKVSNKALPAPIEKTISKAKGQPREPQVYVYPPSREEMTKNQVSLTCLVKGFYPSDIAVEWESNGQPENNYKTTPPVLDSDGSFALVSKLTVDKSRWQQGNVFSCSVMHEALHNHYTQKSLSLSPG

SEQ ID NO: 752 - protein, 474 aa, synthetic construct
  REGION 1..474: note = Description of Artificial Sequence: Synthetic polypeptide
DIQMTQSPSSLSASVGDRVTITCRARQSIGTAIHWYQQKPGKAPKLLIYYASESISGVPSRFSGSGSGTDFTLTISSLQPEDFATYYCQQSGSWPYTFGQGTKLEIKGGSEGKSSGSGSESKSTGGSEVQLVESGGGLVKPGGSLRLSCAASGFTFSRYNMNWVRQAPGKGLEWVSSISTSSNYIYYADSVKGRFTFSRDNAKNSLDLQMSGLRAEDTAIYYCTRGWGPFDYWGQGTLVTVSSEPKSSDKTHTCPPCPAPEAAGGPSVFLFPPKPKDTLMISRTPEVTCVVVSVSHEDPEVKFNWYVDGVEVHNAKTKPREEQYNSTYRVVSVLTVLHQDWLNGKEYKCKVSNKALPAPIEKTISKAKGQPREPQVYVYPPSREEMTKNQVSLTCLVKGFYPSDIAVEWESNGQPENNYKTTPPVLDSDGSFALVSKLTVDKSRWQQGNVFSCSVMHEALHNHYTQKSLSLSPG

SEQ ID NO: 753 - protein, 474 aa, synthetic construct
  REGION 1..474: note = Description of Artificial Sequence: Synthetic polypeptide
EVQLVESGGGLVKPGGSLRLSCAASGFTFSRYNMNWVRQAPGKGLEWVSSISTSSNYIYYADSVKGRFTFSRDNAKNSLDLQMSGLRAEDTAIYYCTRGWGPFDYWGQGTLVTVSSGGSEGKSSGSGSESKSTGGSDILLTQSPGILSVSPGERVSFSCRARQSIGTAIHWYQQRTNGSPRLLIKYASESISGIPSRFSGSGSGTDFTLTINSVESEDIADYYCQQSGSWPYTFGGGTKLEIKEPKSSDKTHTCPPCPAPEAAGGPSVFLFPPKPKDTLMISRTPEVTCVVVSVSHEDPEVKFNWYVDGVEVHNAKTKPREEQYNSTYRVVSVLTVLHQDWLNGKEYKCKVSNKALPAPIEKTISKAKGQPREPQVYVYPPSREEMTKNQVSLTCLVKGFYPSDIAVEWESNGQPENNYKTTPPVLDSDGSFALVSKLTVDKSRWQQGNVFSCSVMHEALHNHYTQKSLSLSPG

SEQ ID NO: 754 - protein, 474 aa, synthetic construct
  REGION 1..474: note = Description of Artificial Sequence: Synthetic polypeptide
DILLTQSPGILSVSPGERVSFSCRARQSIGTAIHWYQQRTNGSPRLLIKYASESISGIPSRFSGSGSGTDFTLTINSVESEDIADYYCQQSGSWPYTFGGGTKLEIKGGSEGKSSGSGSESKSTGGSEVQLVESGGGLVKPGGSLRLSCAASGFTFSRYNMNWVRQAPGKGLEWVSSISTSSNYIYYADSVKGRFTFSRDNAKNSLDLQMSGLRAEDTAIYYCTRGWGPFDYWGQGTLVTVSSEPKSSDKTHTCPPCPAPEAAGGPSVFLFPPKPKDTLMISRTPEVTCVVVSVSHEDPEVKFNWYVDGVEVHNAKTKPREEQYNSTYRVVSVLTVLHQDWLNGKEYKCKVSNKALPAPIEKTISKAKGQPREPQVYVYPPSREEMTKNQVSLTCLVKGFYPSDIAVEWESNGQPENNYKTTPPVLDSDGSFALVSKLTVDKSRWQQGNVFSCSVMHEALHNHYTQKSLSLSPG